United States Patent Application Publication US 2006/0194265 A1 - sequence listing, part 2

SEQ ID NO: 137 - DNA, 575899 bp, Homo sapiens
  misc_feature (1)...(575899): n = A,T,C or G
agatctgaatgtcctaacagccaaagtaaaaaaggaaacccagatagttaccctataatttataaaatataaacacacaagatttataagaagttttttttgagacgatgtctcgctctgtcgcccaggctggagtgcagtggcgcggtctctactcactcactgcaagctctgcctcccggggttcacgccattctcctgcgtcagcctcccgagtagctgggactacaggcgcccgccaccacgacgggctaatttttttttttttgtatttttagtagagacggggtttcaccgtgttagccaggatggtctcaatctcctgacctcgtgatccacccgcctcggcctcccaaagtgctgggattacaggcatgagccaccgcgcccggccgaaaaaaaaattttaatgtattaataacacattcttttcttatactgagttaaaatgttacttttgataacattgttacattgaatctaatcttggtttgggagcaaatacaataaaagtccctcttttttctgatatttttcagatattgcgatattaattgtaacgataggaattattctttctagaccatttataggttttacttatttgtttattgtctgtctccctccgctagaatgtaactgtgggcaaagatttttgtctacttggcgccctgttatgtaagcagtatctagaatagtacctggcacctatgaggcatacagtgaatatttaccgaataaatgaagaaataaggttgtgtgggcaggctggcaggagacatagcttagtcaaaccaccctgaaataagagtgtataaccagtaactgaatcctagggccatcaatctgatcatgatttgtttgctaaggtattttaccattgaaagacagcatagtgaataagagatgtgaacttagctttcccttcttgaagctgtctaggaaaggggaaacctcaaatactctgagatctaagatgacttaaaccaccctaaagtgttttagtatgcaatctcactttatcctggatgctttggatttatttatttatttatcaggtatttatttatttattatggagacaggatctctctcgctgtgtcacccaggctgtagtgcagtggtgtgatcttggctcactgtagtctctacctccctcgctcaagcaatcttcccacctcgacctcccaagtagctggaactatagccatgcctggctaatttttgtttgtttgtttgtttgtttgtttgttttggtagagatagggttttgctgtgtttcccaggctggtcccaaactcctgggctccagcaacgtgcccagttcggcctctcaaagtgctgggattacaggcatgagccactgctcccagcccctgatgccttggatttagactcaaagctctcattgctccagcaggtactgagttctgaatatcacacagtgatttatgaaaataagtcttcaatatctctaggtgtaaatgaatgatgttaacggctgtttgttatgcataaatgaaaatatttcatgttcagacagcaggaagaatacaaaaagaaggaaactagtaagtttgcattcttcatcagtattagagccataaacaagaaaaatactagaaatagaataaaggaaaacatggacttcagcatcttgaatcagagtgatacttttaaactattcaaatggccatagaaattaagattttctttctctgttcaatcattcttaagccttctttcaagggatttcttccttcattttcttaaaattcaacatcttctcctgccagacttttccaaagctgcttggctttagaaagtctgctcatgcattcatttctcaactacagttaattgaataactatatgaccactgtattatgggcagggatataatgacaaacaatacagaatcctcaacttccacgacattagaatgacagcccagcaaccaatgaaacaaaagtttaattcttaaggaggcaatgatcctcagcattaatgaccaacagactcattatgacctacacatgcaaacatgtacatgggatgacataggctgtggtccttgtagaacatagaggaaatacagtctcagctttctaatagcttacaatctatagaagacatcataatgagagttatgacaagaaatatgccaaatgtaaatgatgactaatcatccaggtaactattgacaaaggttatctcctagtttatgtcttcctctgatgaagtaatgtaatatcaaactaatataagattgctggcattcatagcaaaggaactgtaatggaatgttaagaattgtattcactgtgaatacagagaagattgaaaatatattcaatatcttttttataaatttgctatcacagtttacctttatggagtaatacaatatattcttgccattctaaattagtgttttttaaaacagtgtattttttaagcgtacacactctggagtcagagtgcctggatctgtagtttagctccaccatttacttaagcaaactgcttaacctatttgagcaacagttttcacatccgtaaagtggctataatattttaaggattaaatgaggtgatccatgcatattagctttggattgctattttgacaaattactgcaaatttagtagcttaaaactacacagatttgttgtctttcagttctggaggtcagaagtcagaaatggattttgctagactacagtcaaggagtcagcagggctgtgttccatctggaggctgtaggggagaatccattctcttgacttatccaccttctggaaaacacttgtattccctggcttatggcccccttctccatttttcaaataagcagtgtagcatttcctctcttctatccttacatcttctctctctaactccagctctattgcctccctcttgtaaggactcttgtggattacactaaacccatgcaaacagtccaggataatattgccattgcgagatccttaacttgataacatctgcaaagtttctttggcctgtgaggtgacatattcacagcttccagggattacatcatgcatatctttttgagagtggaggtggggaatgttgttattattctgcctaccacccctgtaaagtatttttaaatattagctaatattatttattatgtacattcacattgttcaccaagcttctctaggatgtatctgaaacagttaagtggctattttacatcatgtggaaactgaaataaaactatgtttgatcaattcagcctctgattcttttctcagactgttttaacttgttgttctttgactttctgctcagatcagtggaccattagtttatatcagctgtagttgtcaacaagtaaaaaagttaattgactatttcattatggccccaaagaaattgcatgtgattttaatactccactgtgctcgtgcagctatttcttaatgaactcttctctgggcttatttagacagttgcgaagatttaaatgcttataaactgatgttatgagaaatctgttgtgtactttatgcatcttccaacaaggcttcttagatgatttaaaaaatttatcaataaaaatgagaattcatccccaggatggacaagtgttcagtcaatgagaggcacactttggtcagatactaacagccagctacttcccagaaagcgtgttcaaggaagaagttcaagcttcacaaagtggtttacgcctcaggccttttttttttttttctgcctgcaacaactatcactttctttcagatctagctcaaaactagccatatcccaaagtttcttccttcagctgtgcttcaccatgacttaatacttcgctttatactccttcgcatttagggtacatgtatttgcacacatgcatatacatacatacatatacatacatatatatacatacatatatatacatatttatttattcatcttcctcttccctcaagtggtttgttgtctcttatttttttatgttttatttttttgcctgttaaactcagatgtaaactactaattctcctgtatcccccacagagtaactagcactgtgttgtgcccttaataaatgcttgcaaatgacaaaatgaattctgggctttggttaaagatgacttcagcatggaaatgagcccctatgtttgtgtgtaggttttaatggttcattttcttgtcagacttcccctggttatgaatgctgtggcggcatcagcagtataaagggaggattttattggagaacatttggaggattagaaaaatctccaaagctttggaagcaccgcatcctgtgttcagacttctatttctttctgtctcaagaccacaataagcacagaagaaagatggcaagatccacagggttccatatgtgaagccagtcccccagcccccctcagaagtaggtgggaggaggaaaggagcataatcattagagaatttattattcagctgtgttaattctcatcaggctgcaactttgcatacgagctcttaaccccacaagatatagttattatttaatgcatgatgtatttagttttaagttatcctctttcctggtttttactaaaataacaaacaacaaaaaaatccccatgataattcatgcattcagaccaaaagaattcaaacaggattcaatgggaggctgtatagccggtacctttatacctctttatagtgagccgtgaaaaacataatacattttggtgggcatagaaaatactcactagcataaagggagaataaggcaccatttattgtcccagaaaaaataatttgtcaaacacatactgggttactgtgaagaccaggcattttttcccccagagtttattcttctattaacatcattagacgaggctttttgaaaatggggagcggctcaccagtgggaacctaccagctctggaagtgactgttactgtcccatccctccacctcaatccaattcacacttttatgattggcttcctttttgacccatgcttgttaattatatccagctgtaggcaaattgctcttccaaattggcaatactgagctctcaagctgctcacattttctgcttcccttgataaaacctttggagcatgcattttcttgactagtgtttctgaactaatcctcagttatggatgttttaagggttcaagggacttacaaaataactctggttgtgaatacagtgtatgtctttccatctgatcagaaattgcctaagaccatatagagagaatttcctgagaaatgcaggcaagtggcatcactatttctcttattcctgaatactctattgttaaggtctaagagccaagctaactggacaggtcacagtgcaactccagggaggagttaggctttgttctacaatccaaggccccagtgcccatccagggtgatagcttttaagggtatgacaagcacatttttccactctggaagtccctgctctattcatgggctttattgtcagaaattccctgtccctcttgtccccagggattctcttgacaacacacgtacccatgcaagaagtttcctgtaagaaagtgcttataggtgtgtttttctttcaaagagaaaatagaagcttatttccacctaccaggtcaagaggctctgcaagaattggcttgaggattttgacacctgactcaaataaaaatttttagagataagaattaggtacataggaattggaaaaaaatcagatttagaatccgaagaccccaggtcagagttacaatcctgctattagctagcagcataaccttgggcaggtattttaattgctctaagctttgattttcctcctcagttaagtgaaattaatcatacctgccttgcctccttcacagagttggagtgaggatagatcatgatccatcatattcatgtgggtgaatatgctttacaaactaaaaagcgtaatataagcagttagttattattaacaagctgagaatattatctaattgcttataaatacatgctgtgtgtacactcatgatctgccactgggtaaataaaaccttgcttccgctcagtacaagtttgtgcatagtcctttagtgaacaagacaaggaaaataacatttagcagctgttatcaaccaggccctttcatgtctatgctttttttttttttttttttgagatggagtctcgctctgttgccagactggagtgcagtggcacaatcttggctcactgcaacttccacctcctgggttcaagtgattctcctgcctcagcctcccgagtagctgggacaacaggtacatgccaccatgcccagttaatttttgtatttttagtagagacagggtttcaccatgttggtcaggatggttttgatctcctgacctcgtgatccgcccgcctcagcctcccaaagtgctgggattacaggcgtgagccaccgtgcctggcctcatgtctatacttacaagcaaatctgcagctctacaagaaaagaaaatgtatatatatatatatatctatctatctatatatatagatagatatatatatatagatagatagatatataatttaatcctataaaaatattattacttcattttcacaaaaaggaaattaagatacggtggtattaaatgttgtttaatgcaatgttcccaaattctgttccctggaaccctggtcctgagacctactcctctattaaagcgttctatggtccaaaactttgagaaacaatgaattctttttccttctccaatagacttatagcacatgataccatatcggaaaccatgggaaagattctataataaagaagcttgctatattgaagaaatctgttaaactttgctcagtccagagttctccgagctaatttaatcttgaggctgtatttttgaattatacttatttaaatctgatagaactgggattctacagaaaacacttgccaaatgcagatctaagattatgattggagttagtgtgtggtagatctgcaatcagaacacaaagctgtcctcttttaaaagaaataatgtaaccataggccaaaacaataggaaaatagagaagagctcccataaaattttagtatactacatctattgctaactatattaatactatgttttgtaatttttttcagccttctttttttcttggttatagtacaaagacctttgtcttctgtttttgtttattgttgtaaaatatacatagcataaactttatcattttaacaattattgagtatgtaatttggtggcattgagtccattcatgttgttaggcaactattaccaccatccctctccagaacagttttatctttctaaactgaaactctgtattgtcttctgatgattttacccaacatttgatcataagcatttttccatcttgcaatttacttttttcataactttcatttctagtggctatgagatattctaccatataatgcttatgaatctgcctattgtagaatatttatattctttctcttttgaaatgataaacatattaaataacatttttcatattttggattatttacttgcaatagcttctagactaaagaataggaagattttagtgatttttaatgcaggctgatgatttcttttcctaaaagtttaaccaaatttatacttctattgattcatgtattcatttattctttcaaacaaacaaaaatctactaattcctaatatttgccacgcacttagctatgtagaagacccaccagatttctactcaagtgatttcaatccatactggtcgcattagttatgcacaaaaggaataatgtacttacctaaaagttttattgcatgcttttgatttttagtgagaaaccatctgtgttggtttgctgatttcttttgagaatttcctttcttctctttgcatcgcctcccccacttctcacttaagtatgtgtctttgggtaagttacttaatctataaccttgttttcttatttgtcaaatgggaataattgtaccaaagtcttcacggaattgttgactgaactcaatgaaacactgaaaatcttgatgtctcagtgtgacattgtatactctaagacagtgcctagaacatttgaagaactttctaaacattacctgctattattattacttccatgatagagaaattaataaagtttcatgaaatgaatcttctatcagctgtcccccaaaatgggcaaggtaagaattgtgtgcactttgtcctggcactgtgtgaaaatatttaaagaagttttttgtttgtgtgtttaaacaaacaaattaccacgtcatgaacttcttttacatttcttacaagagtagaacagatgaattagtatacagacagtagggttttgtttgtttttactgggaaaaattgctgctaaattttaggaagttctgctgtcctcaaaaagaaaaatatgtccctcagttttttgttacctgggatctaggaatgttctctaattaaagaaatggaatggtgatggtgtgttgaaaggtataggttaatgagttaaaaaaaaaaaatctacattgcaccctaaggaaggatgaacttaactatgctgaactgaattgacaagggttgagctagtcagtgtgctaatgagcaggctactattctcatagaatttttaaaagtcttttctgcctgatatgtatgtgtgtataatatgtatttatatatgtatatatttgtgtgtatatttattacatttttgtttccacaggctctgtcataagtctggtcattaatagcatatatttgattaaaagaatatgtggcttggtaaattatgtgaatgttatattaaaatgaatttcacattgtcttgatttacaaaggctaagatgtctgagaaactgagagatgtcaatcaacagactattgttttagcaattgtacataacacataaaaattctgaatcaaagttattatgttattcaattgtgaccatacctattttttgtgacattttacaaaaatgaataaagtatgcaccatacagtcttaccacagaagtaaggcagggtggcatatggcgaaaccacttcaagctgctgaagtagttaactgtgaaatattttactgtcataatatagcattattttctgccagatgaatcattccgaagaagctgttttcatggtcagtgtaaaagtccttttgttaaatacttatgtcttaactacctactagatattaaaaaaaacaaaaccacacacacaccagacctaggtgcaaggaagggataataagccctgatgcagttcttaggtgagaactggaaaggggccggagggtttcagagcaacaagcaaagtcagtgaagcagagtaaatccaaatacttggccaatgacaaataaaccagaaaggagacacgccagctgttcacgctggaaagttactgatcgtttattctggttcaagttttatttattctatgaataagggacaagttttcgatgggggtggggtgtcttattccttattacaagaataaggaacggggagttttcaaggcaggcgggtgtttcctcagggcgcttccacactcccctttcaatcagcaaccgctcggggggacctccaccttgggacggaaccccaggacgcctctcctcggacggcgggggtttctctgcgcgcgtcctcggtcgtctggtcgcacggcttaccgaactctcgcctctcaaattctgagttctggaacagggcagcgagctgcgccggctcccctttctcgctcgctccctccgagcagcggctggcggcggggcccaggctgcgaacaaaggcggcgcggggcgcgcggccggggctggcgcgcgtctctccggcaggaggcggtggcggcgccgcgcccgagcccgcattcctcagaagcgcccggagcccgcggggcgacgtcacccccggctccgcccccgtccctccccgagcaaagtaactcttgactaacaggagcagcctccgccgagcatggagagctgccgccgcggccggccggcgacgctggcgacgctttcgcccctgaggtagtttggcgaccgcgaagaaggaaaaagggcgggcgggcggctgtcctctcaccgtcctcaccccgcgaggcccggcccgctcctccgtcgtggatttcgcggcgatccccccggcagctctttgcaaagctgcttgaaacttctcccaaactcggcatggatacgactgcggcggcggcgctgcctgcttttgtggcgctcttgctcctctctccttggcctctcctgggatcggcccaaggccagttctccgcaggtgagtggccggggggcgtccccgacgaacgcctggagtcctgggctcacgaggggtgagccaggtccccgctagggctggggacaaggatcgtggggagctctctctgtccgggggtggggaacacagggtagagggagggctgtccccagagttcgtgccaggtgggacgcggggcacccattgttcctctccgaagcttgctcggggctcaggctggcacggtctagccggagagtgtggggacctgctggcttcggcgtctcgcgtggcctgcgccgggctagtggggaagagagaaagaaaaagtagttacgactcccgtgacggcactctgttgcttgtggtgcgggtttgttgctgtctgccacttgggtgtttaaacaaattccctgggaagccattgtcagaaatgtggagattcgaagggactgacctcggcgcgctttgccaggtgctttttgtcccgggaataacctcccctgactattgtctaactacttccccgtccctcccggagtccccttttctcctcccccagctctgggttgctcccgggcttgccctgtgcgctcgggcactgcttggagcatgttctgtgtgtgtgttggcggagccctgtaagatgtgttgaaatgcggttctaaggacccactctgagcgttcatgggcatcgaggtctgggcgcctggtggaggaagcctgactcgcgcgtgggagcccgctcctcgggcaaaaccaccgccaggctggccccgcgctccccggatccggcctggggctctggccccgcgctccccggatccggcctggggctggaagcggactgtaaatgtctgccttctgccggagaacccaaaaggagacaagtggagcgtctcgctgtagccctgggggttctcggtcaagccgctcagagaagtccgtgaaccctggctctcccggtcccgccctctgttcccctccagttttgttatccttcgtgtaggttggttgcttctttcgttctctcctctgggggctctgaagtttcaccaggtggacgctggggagcgggctcccgagcacttgtctacctcccgccagtcctgacaacttttctggccaacctacccagcttcgcttggctggcgagcgcatctgctgctggggttcgcggtgcagatggagacgcagtggtggccagagggtgatggagaagacgggaaaagcgacagccacgctcctggctgaagccgcaggacgcaaataacttactttgtacctgacagtttctcacgttgttgtggaggccctgtttcctggaaataaactcaaattgttgttttctggagtaatcgtttatttcccttccattgctctcctacccccgccccatttagaactctgtaaagggagttaaacaacagattcaggtggcagcatgtgtcgtacattcaggcagagattatgaaatggcagcacgcagaggaaaagccctgtatataattgatgtacgcagagggtaacagctctatgcaaaaaataatccaatggtttaattgaattctttctggagtaagcattactgcatgcatttctgacatataatgcccgttagcattgaaaccgtgcttgatgtaactcattatatgcaggcaagttggagtgagtattgatttctgcacagtgtttgtcactgcacggagagcctacgcttgaaaaggcttgtagtttgttaattgaaagtttgaactctaccagttgcataattaaacttacatgtattcaagagttgcaactattaatgtctcaacagcgatggatatattttcagcagttagaaaactttttctctttttaaatgttatttaccctttaattaacaaataaatactacttttcctccagctgaatgtgaaaatgagcttttctgatacctggagtttagatacgtacaataaacaattgtgttcttagatatctagttctaagtactttaactaaatatgcctggcttttctttagtgacaaagcataacatttgacatgatgttgtatatttaattaatataatgtgcattcctaaaaagtacagtaatcacaggattgcatctcaagattttgccctttaggaatgtatgcccagaaatgaatgtcttttattcccagagtttaaagtcagattgtggatttgcctttctccacaaattataagtttgttttgtaaatacttccttttttttctggctaccataaatcatttgatattttattgtcataaaattctatggcagtcagatttgttgcagacatagattagagatgtattgaagattggaggtgtattccatattgctggtttttcttatattttactttaactagtgaacttttattccttttgagaaatttaaataaacccactttaaaagtccaagacaaattcatgttgagaatttaaaaatatctgaagtatgtctttcaaatcatactcattaagatcagtttactttccgatatcatgtggttcctaatgtagtaagcttcaaaagcaaattttgaaaggctgagcattgttgggactttgatgtgtcatatacttattcagttttctttgtttaaaccaaaaatgtaagagtgttttcattattgtgacttttttcttagcttttgcagttaaagtgtaaaactgctgcactgtgagcctctttaaaaccagaacgttctgtaaatcccaactcatacattctttcagtttcacctctcacttaaaatgacacccatgtcatatctgaggaaaccgaggcatagaagaataaagaagtattaaagtttattcactgggttgtatagctgtgatctcttgatataatgtaagaaagttttctgtagaaggacttagatgactgacgaaaccagatgcaggtaaggtgacttggaaactcagctttctcctctgtaaaatggggataataatacccaacttgacctttccacatgttttttatgattaaatgaagtaatttatgggaactagcactgtaaattgtaaagcactgtgcagctatctggggtgtaatcatcattaagtgccttagtctcagctttttactccttccaaattctctctccagtaagtgcaggctgttcaggatttgtgtgtgagtgtgtgtgtgcgcacgtgtgtgtgtgcatgtgtgtgtgtgttttcactcagccagtcattcatttaattattgtttaacatagttattgttaaacataaacatactagattggccagaccataattttgtcagcacaatgatcgattatccttaatttttttaacttacctcgtataaatccttacttgagttagacccatggaagagtcactattaacattcctggcatttctaactacagaaaaaaatatttttagtcagtttctttagctgtttgtttaactgttggttcaggttttcaactctgtgttgagaataatatgtagctttctagatgcagtcttatcaatgacctagagagggactattgtctctcttgtatgataggagcctggaaatacagctcgagatcctgctttgtctatagttcctgacatgtcaccctgttgatgtgcacttagaatgctgtaactcatctaagcagcacctgagcagtatctgactccttgttgtctctttaggtgagattaatttctcttatacttattacctgctaggaagatactttggagccagcttgctttaaggtttgcctgttagttttttttggttttgattggctaaatatccctcgatccctcaattcattaaaactccacgttctaatcactagcaatcatatgtagctggacatttccaggactgtttttttttctctctctagttctcttgcatctgactcttgattttcctaggtcgtgagatgtagttttgtgtctggcctacccagacggaaagaggagagtctggctgctgtttggacattggcatgtgtgctgctgacagctcttctctttgtgctcataaaagtgaatttcaaaaataaatcaacccctctgccactctgccccctcccacactccctcctactcttttctagcaaaaacagagccccacatatatatacacaagatcacagcccttttgtttttgccaaatatattttagtgctgtacatgtccttaagaactggaaatatgactcatccactaaccaaagctaatgccaacattcccaccaaatctcatatttctagcaatgatggtttgttacaggtttttctggcctttaaggtaatatttaattcatgtgataagattccatatagaaaaagtgtgttggctactaatatttttaaagtgcagtataccaggtctactcaaactggtattaaagacagtgaacatcatgctaaatagggatctgtgctgctcccatttcccctacttgcttttcatggagtgcaggaagagagatgctggaagattgagagcaggaagcatcaagaaagtttacagattgttcttaaagacaaaacaaagaacacagggattctgtgtgtgtgcacgtgtatgtgtgtgtgtgagtgtgtgtatgtgtttttgatcttttacttaatttttagaagaggaaaaaagtcctatggtatttttgacttgtttattgaaatcagcctttgcctttgcgcaaacacattttctagttctgtcaatgtaaaaatttccctctgtgtattcctctcagtctttacactttgatcatatgtatctggtctgtgttccttcttcaaatggtgtttctttttgcctaaaaaggttgtaattgcttttgaacatgacttgtttttttaatcaaaactcatgctgtttgtcatagtactgaaaaaaaaaagtacaagacatcaattcatgataggtcttaaaacagtatttgataacaaagtaagtgaataatacattaatcaggctattttttatttcaattgaagcaaaaagcaaacttgcatatccatgaactaatcttttaatgtcacagaacatttatttgttgctgtttctgaagtctttaagttcccttttataaatggggatagacaatttcagaaccacattgcttgatattttgagataagtgagataagttacatacaactatgccttggaaaacttaaaaaatgttatgatgtttgatatcagtgtgaactctgaatagtttgtaaacttcacactccacattagtgcaaatgtgttttgtgaaaatactcctaaagaaacgtagtttcacataaaaggtttttaaagtttcatgaagattctgttgtgggaagtatgtttattttccttttgtattcttgtgggaattcttttgatctgtatttaatattttaataatgaaaactaagtgtatgtaattttaaaacttagtttcgtgaggttttttttagattgttgaggttctgggaaaacactgggcctgggatctaaggatcacattgatcctctcgtggaacattgccatttccccacttaactctggttgaaatttttggcattctccttcgtgtgttgataatccataaaaattacaagtggcttattttgtcacttacagttgttttaggatcaaattaagttgtcctaaatggaataatccgtgtttccacttgatatgattattgagctctgataatgaaaatgatgaacagggcagtgctggctgaatcctccaacaggtgtcattctaggaattgttttaataaggggaattcagaaacaaggcaaaataaaatagtgcgtagtggagttattgtttgtatttattttgttgggaaatgtgaaagatgtaagtatgtagtcctctgtgtgaatacacacacacacacacacacacacacacacatcttaacaatgctaggacttagttgtagaaacatttaggttagaaagaaggtaagggcatctagagatggtatcaaaactccatacttaacatttttggaaagagtagtgaaaatagatcactactttatttcatagatgtagaaacaagtggaaaataagctgtatataatctatactgtatactatactatactgttatacttttaaggataaaataataaatctttctccagattggtatctattaatataaacccttcccagtgcagcctgttccttaaccagctgctcataggccgattctccaagcgctgttcaaggcagcagctgaccagccacagaaattcccttaatccgtgttggatagtggaggtgacctagcagctgcttaagtgacagactggcaacagttccttgatgtgatttttcttaggtcattcagtaaattcaagagtagagaggaaggctttctagggtcctcactacccacccagggattgatgactgattgcttcatggtcattggattcctcactgcaaggtgtcctgggattttgtggttcatggaccaatataattagcatcatctggaaatttgtgatgatctgtgatcatcagagtcaccccagatctactgaatcagaatctgcattttgatgaaatccccaggtgatttgatggaacatttaattctgggaaacactgctctaggacaaagaaagctcagtttaaaaagattgtcacatgaactttaccatagaatttcaagaatattgcaaaaggattaatgataacctgaaatacatttccttggatttatatttctttttcctttctttttctttttctttatttctttctttctttctttctttttttttttttggagatggagtcttgccctgtcacccaagctggagtgcagtggcacgatctcggctcactgaaacttctgcctcctgggttcaagagattctcctgcttcaggcttccaagtagctgggattacaggtgcgccaccatgcccagctaatttttgtatttttagtcaagatggggttttaccatgttgcccaggctggtcacgaactcctgagctgaagtgatattcctgttttagccttctaaaatgctgggattacaggtgtgagccaccatgcccggcccctggagtatatttctgatcaatatttacttgattattatttaatattccagacacatcaaaacaacagtactatacaagctttttaaaagaatgctcagatgactttgaaaaaaaatattttcataagagactaaaagtaagactagttttggttatgaatattttgtataagaatatttaaagataaacatactcttcaaggaaccaaacatgctatatgcaaatcatttttagcataatgttatgttgatacaggaaatactattccctctgacattactagtagcagtctcttgctttataattctctttttcatctaagtgtaatttaagatctttgtagtaaggagctcatttataggacagtcaaatttaatgaatgggagttggtaggtagaatgcattaaatataactggtgttctttttattatcttttgtgctcatatttaagaacagagattcttgtcagttttctcaagagaaaaattatgatgtaatagacagtgtacactattcatgtcaaaacacaattttacttgcattttatagcttgctttagcattcttttagaaaatgaattttcccagaagacctaattgccttcttattaatgagcctgtaagtgttttttgttatccatttactattctaaatgtgtctacttgtgctagctgtttcaacagtgttgtctctgattaaatcacaactgctatatttgtttttgccattcactagtgattcagaaaatattggcataatgacgtggttatggcagagactaataaaaaacaagaagtaaaaattaatgttcacccattacagttggctgtatcatgagatcagaagctggagtttgggataatagcaacgttctctatatttttgatactgtaaataaaagtctgcataacctatattgtcttaaatataaaatatataatttattgaattaatgaactgtaaatcagtgtatttccatatgtacttaatttagacactaatgtttaaagaaagatttaataggagactgatcactgttagaggagaagtagtggtggagagactctgagagggcactttcgtatatcttcaagaacttcacagttactttttctagtttgactccaaattctggaacttgtcttttttactagtactgcttttattcttatgagcaataattaggttcatttattttcttatatgttggagaagagagcttttcctaaagcaattgcaaaaataacaatatgagctgtaatttactgagagcccatgacctgctagggcctgtgatcagtgttttacataattttaaatcctcacaatatcctttaagatgaggatcatctccattttacaaactaaggcctcgaggggttaagtaataacttgtcccaagtggctatatgagtcactggtagagtcaagattcgttaatgaatgtacacaaatgtttaaagattagacatttctttggttgcatcttggcagaaaatgtaacccagactggttgcaacaaaaggtgaatttatttgtctctcctaactacagttcaggtggagcttgatttagaagttgacgtaattccactgagacatgatgtttctctgcctgcttagtttagttctagggtattccaggagcttcttaggctccatatagaggcacgatggctgtggcagctcccaccgaacaagatcccaggttcaagtcccttaaggaaatgtgaattatctgctggttgcacctgataaggctctaaggtttacagtgcttgaatccactgatcttgtttccaaccattgaatctaaggctctgactgaggggaagttagtgtgctgattggcttggcccagggtttgtaatctttctaatggggaagaaagaagatgggagatgatggggaagagacagtaggatcagattgttctctgttgtggaccactaggtgatctctaagtgggaaagcgtggaagagaaagagaggaaagaggcaatttgtgtctggcaggcttgtatacatttacagatcacctgtttttaatctgagagtgtttatttattggctttccctttaaggactactttaaagcatgaatttatattatttccattattttattttccttgtctcagtattgaattagtctaacattaaaaatttgtagaatttggtgttaaaaaagatcttagaaattaatgaccccttcatttgacgtaagttgcccaaagtcatacaggtaggaagaacttgagctcaaattaaagattttaatgtataggttagtgttcttactatatatgtatcatatattaatgtatactatatatatatcattttccttaacagtaatctatataattattatttaagattaaaaaatttttggcttgtattccaaatttctgaaacaatatttccaaatataaacctgacttagtgattggatttgattagaatagtagtctgcatataaggtgataatatgtctgtgaatgcaagagactatcttagataactgcttggttttcagatatcatgacagaatttatacatgtatgcatgtataggtgtttgcatgtatgcatttatttatttttaatagaaagcaaagggtaaagtaagctgtggtaaatgatattgacacagacaaaacctactaactctactatttttgaaaacctcaagagatgatggtgattttatttttaattttgatcctctaacctctgctgcctaaatttattatgtatatctgagcaacatgggatattaggaagagttgctataagaaatatcttggggtactgaataatgaataaaatgtagagaagtagcagctgtttgcctagctacctcctctcctaatgagagatttacccaggctgtcttaatcacatgttagtgctagtggatttgactgaggaccatggctgtgccagttgaggccaggggatagtctccaggcactttaatggtccgtaatggaccttcaatggccagggcagctggcctggcacataggggtgtagacagtggttgaggaggaaggtttactgacttcatcatgcttccctttgtcactggaggcttgttttcgtacacttttgtctattatcataaataacttatgataataacttatgactctttttctgtcttatttatgtccttatgtgatgactgtcagtcctaaatgatgaagtttgtaataatttgccctaaccacctggtcagttggagcagattgctatctggtgttgactcattatgcccctttatctaaaccaacacttaaatgctcaggaaatatatgaatgaggtgaaggggctggcagcaacctacctcagaaccaatgcctttggagatctatgcaggaggctgtttaatgcacagagcactggccttgctacaggaggacttatgttccagtcttaagctctgtcactttctgaaatttgggagcagtcctttctgcttgatctttcatttctttatcaccaaaatgagaatattacaatgaagaatgactttaatgtcttgtctagtctactgaaccagacacttttaaggtgaaatgaataatatatgtgaaagtagttttatatttgtaaactaccataaaaatgtaaattttgttaggaatagaaactttgacaataaggaaagtattgctgaaggcacaaaaagtgtgtatgctgaagaagggaaatgaaaacaataaataaatgcttcatatatttgcatgtttaagtgatacattgcctctcaatgttggggaaagtggtataataaagaagaatgagcatggttcttgtgaataatgggtgattctgcaatcatgtatcataaagagcagtccccccaacttttttcacatatatgtatttcctatgtatgtataaataaactttaatgctaccaggtagttcactagccctcccatatctctgggggatacattccaaggtgcccggtagacgtctgaaactcgtatggaacccacccttaaatatactataccatgttgtttcaatctgataatggaaatggctactgagtgactaacaggcaagtgggctgtacaatatggacacactagacaaagggatgattcatgtcccgggtaggacggagtgagacagcatgtgatttcatcacgccactcagaagggtgtgtaatttaaaagctgtttatttatgaaattttttcgttttcttttcttttcttttcttttttttttttgagatggagtttcgcacttattgctcaggctggagtgcagtggcatgatcttggctcaccgcaacctccgcctcctgggttcaagcgattctcctgcctcagcatcccaagtagctgggattacaggcacctgcctccaccatgcccggctatttttttgtgtttttagtagaggcgggattttgccatgttggccaggctggtcttgaactcctgacctcaggtgacctgccgcctcagcctcccaaagtgcgggattacaggtgtgagccacagagccctgcttgaaatttttcatttaatatttttggaccacagttggccaagggcaactgaaaccacagaaagtgaaactgtgggtaagggggtcctactgtatttgtatttcctccagatattcaatatagattatgtgattataaaataagttattaaagaaatgtaaatgtgttttaagtacttatatatatcatatatagaaagttgtgtgtatacttttttccttttaaaaattttcgtgataagctagaacatgctcttgccatctaagctgttctgcctggtttttaagagcatgatcctgatgaggtttatatcctttcatttattctttcactccatgaatctttgagcaccttactatgtgcccatgctgtgccaggttttgggtatgctggcaagtaagccagcagtgacttgtcccagtgcctgtgcagcatttataatgttaatgactattaaggcatggtaatatttgcatcgctgcccacatctagtgattcacaagtgaagcttggggctttgttggtaactgaccatatattttataactgaccatactcctgagatgtggcaagtgtcaaagctctgtctgtcttacagtttgctgattcacttcagaacttgcctaggataattccagtctatcagtagtctttccatagtctcaaaactacccaaacaagtaaaagcctaccgaaaaagaattacaaacacattgccacaatgatagtaaaattccgccaagtggaatttcccaaaacttgagtaatccgaaatgtaaacaaagtcaggcagaggagagagcacatttgttttctggaggtttgctgtcactaactctccctctggaagcaggatcaagaagattggtggacagcctcttagactacagtgtatgtcaatgtgcatttacaacctgaatattcacatgcataatccctggttgtttggctgcagaatcctgtttgctctgacctgcagctgcttatgaactgcctctcttgcctggactttgatcagccctctctctgctattgcttctgtagcccattgccctgtctagtgggcagccacaagagagggagaccagtggctggcagagtcctatcagccaggaatgagggtgggctgtgaccatcacctaattgccctggcacctgcatcccataaggcactgtttggtcattcattatgaaggggacaacagtagttatttaagtacactcacggtcttaccaggaaatggggattttgaacttctgtcttaaaagaggcccacatggcctctagagtgggcctctagtgtgaattaaggagagaaaagcaattttggagaagtgtaaatttttcctaagccaaattaaagttactagattacatatacccaaggttcaaaaatagaaatttaaaaaactgttttttgttagttgagtcactgatattttatgcccattttgtgtttaagcaaaagaatacttatcaaatgctgatctccacacatagtatagagcatagtgtttaagagtgcggacattggaacttgactgcttgagtgggaatatacattccaacatgtttttactacatgatctgaccactttccttcagtttccacatattcaaaatgggaaagtacccattccagatgtaggttttgagaaatattgagttacagtgcttaaatgagtgcctggcacactaataaaatttgtccattttagttattattgttaatgaaattgccagtgtttgcagaatatctaatctcatgctgttatctcttaaaatctctaactacattatcttttactttaaaataaaaccaccagagaataaataataggatgcctgaagtaaatcagctcaatatgctgattaacaaagaccacaagcatcactttatagaatataatccagtgtttatgaaaacaagaagcaaacttattctttttttatgttagaggttacagtgacttataataatttttttttttttttttttttttgagacagagttttactctgtcaaccagactggaatgcagtggtgtgaacatagctctctgtggcctcaacctcctgggctcaagcaaaactcctgcctcagccttcagagttgctgggaccacaggtgtgcgccaccatacctggctaatttttaaaaatttttttgtagagatcagggtcttgccatgtataaaaacctacccaacatctttggaaaatgcatttaaaattctctaggtaggttgagggaggtgggaagtttttggcctacaaagaattgcttaccttctagaacgatttaatctcagatgataaaatatgaaaattctaaattgggaataaggttaaaataagaattgaccagaaagtggaggaatgaaatctctgccactccaagcagtgcccatcccagtaagtattatgtcctatctgggagtagcactcagatttagaatgagagaattagaattaatcaacaagataagagggatctctttaatgcctaagaatgttggtatattgtttccccaatggttatagaatgagaaaggaatatcactattgcttctgtttgcatttgacacatatgctaaacaaatgcactggcttttagaacgtgtttatgaattctatataacatttttctttttctttttggaggttgcctagctatttaattttccttagttcacaaaacaatgaggtagtttcaaatctatttgaaccccaagactttttcaagctgctgttctctgggtaaagccacttagtcctggcacatggtggaaaggtctggctaaagttttgacaattattagctcatttgcagagttgctctttgacctgtcaacacagaggaaagcttttctaagctgtgagaaggattttatgttagactcgagctttagatttcttttatttttccaactttttaacactatcttttctagctttaattgacacaaacttctcttttccttgtgtaacacttgtgcactccagatgttagaaatccctgttaactttcttaccggagaagctctttgcactgcaggcttgaatgtcactgagataatgtccttacaatatttgcaactttgtgttctgactggatgctcctactaacctaggtcttctttgtgattgcggtggcagcagctgtcttcataaactcatcttcatttattttttattttatgtgtgtatttattttttttgagacagagtttcgctcttgttgcccaggctggagtgcaatggcacgatctcagctcactgcaacctccgcctcccaggttcaagcgattctcctgcctcagcctcctgagtagctgggatagcaggcatgtgccaccacgcatggctaattttctatttttagtagagatggggtttcttcctgttggtcaggcctgtagtcccagctactcaagaggctgaggcaggagaatcgcatgaacccgggaggcagaagttgcagcgagccgagatttcgccactgcactccagcctggtgacagagtgagactccgtctcaaaaaaaaaaaaaaacaagtaaatttcttaagttgttatcattttggtatactgtttgaccagattcagtctcaataaaaggagcattaacaaaacttcaaaacttctatggcacatctaaatttaaatatgaaacagttctaaaagcagggatgtatacttgcttgtcctggaccccagaatcgtgactcacttattatttggaaagcagactgctacatattttggtcacaataatacctaaaggatactgaatcagaaaatgagtaactgaaaatgggagatctctataatgaaaacactagatagtagtatacttaaatatgatagtgtacatgagaaaccataaattttaaccagtgtgattcaggctctggctttcaatctatttgcactagggtatcggacaaacccacaaccaggaaaggtgagcgcagatattgccagaagaacccaggtgctctgattgcttactccttaggcaacgtttcagattttgcaaggtacattgtgccctttcccggctaattcttatcaggaatgcacatcccagttgaagcctgctaattgctctgagggctgttgtttttacctttaatttaggttcaggagtctgtagggcaatcctttgaagttcttagttacttactgttcactgaagtatccacttgagatctttcctggactctctccacagtttgttcacaatttggcacaccattggctgaaagtactctatccttgctccttgctcattgacagttatactacaggctgcttccagttgccaacacattttagaaaagcatataattttattaagagtttttcctgttgctttcacatgtagtcaagtaaagggcaggggacagagaaggggcaggatgtcatgtcagcatttacctttccagaggctaatgctttgaaagaataagaggggtccttttaggtcaagactcttattgttcttgtcacctgatttgttggcattgcagttacatcacgtgttgtcttttatgtgagcaatgacaaaaaggatatatctattctgtacatttttatcaaatatgatatccttcaaagcttgttaaaacaggtgatatcagtctgtgttcttaatatggtcttgttggcaacaccttattggggcgggaaccattgatttgtgcatttccaggattgattactatccctaataaagttagtctggtaggcaaaatagcaagaccttatctctacacacacacacacacacacacacacacacacacacacacaataataaccaggcatagtggtgcatgcttttagtcccagctattttggaggctgaggctggaggattgcttgagctcagtagttaaaggctgcagtgagtggtgattgggcactgcactctagcttgggcaacagagcaagaccttgtctctaaaacaaaatacataaagttaggctggtgagctagggtctcttcatttaacaaaatatgtatgacagagtttatctgatttctttcatgttagtttggttaagttaatcaaatagtaaatgcatgttcattctgtgccaggcagtgtatatagcacagagggcaaaatgatttagttgactaagtccctgcacttaatgaccttacagactatttagaagatctagaaataagtaagatataattaagagtgggaggtacaaaaagtgccatcaggacgtggagaaagtacagtcactcactcctgggtgattagttaagtttctcggatcaggccatcaattggcaaaatccttatgaatgggcacaaaatgtacttgggaaaatgaggaagtaatagcgatggtggtaaatgtttaataatcagctctcaagccaaaaagttcaggttttatttgtttgttttgagatggagtctcgctctgttgcctaggctggagtgcagtggcgcgatctcggctcactgcaacctctgcctcctggcttcaagtgattctcctgcctcatcctcctgagtagctgagattacaggcatatgccatacgcccggctaatttttgtatttttagtagaggcgggggtttcaccacgttggccaggctggtctcgaactcctgacctcgtgatctgcctgccttggactcccaaagtgctgagattacagatgtgagccaccatgcctggccaaagttcaggttttagcacttgccagtttccatggtataaatactaccaccatggctgaattcaaaggaccaatgtgacatcactgaacacaaaattaggaagagatgcatagtaacacacccttatttagtacttccaccatacagatacaagagaagtaaatatcctgcaaatataattaatagtaaaataattagaaagtgataagttttgatttattacctctgtttttaatataatttatttagctgtaagtttatataatttaattttaaataatggttgtgactaataactggcccacaaaattcctgaacattttagcaactgactttcaggagctggtataggctggtttcagcccagcccactactccatgccttataatttggcatatgggtgtgaggaatccagtgagataatcctctttaattatgggatctttctataacactttcctaattgaacagtttagtgtaagaaaacctggtccattttgaaactccctggcaggggtttagttatcaagaaactttaggttcgttgacacaaaatgttgatgtcagaaggctttggtgcatccactgtggagcttaatctcaggaataaatccccaagaagaagactgtttttctgtttaactcaagtttccccactatacaggattgactctctttggtctcaggtgctgatatgactattcaagctctctttaagtcctgttaacttagagcactgctaggactatataaaaggtaaacttttcaatgtctttgaactatggacatttttcatgctaaacaccatctttcccaaatactacacagtaggtagtgggttttcagtaaatgtagcttgtaaattactacatcatctttgtactaacaaacctcccgtggctcacaagagcacccaatatttaagttattcagaaatattggaagaatcaacatgtctgtaaaagtaggtagattttcatccaattctgctatacattgccactttgatggattttaattttgggtgtatgtatgtgaaattgttaacatctacaaaatatacattattaaatataaagcatgttttttcatcttaatactgcatttgggctttgatttaatggtcttttatcattattttctactgaattatcagttacttttaagcagttattactatttgttagctaaagttacttttgattatttcacttgagttttaaaattctttcattatttaatctctatcagtgttagaaaagtggaatgttgttttaacatatgctcttataatatttgtttatataggacaaaaatatttcatgttccaaaaaatgtcatgtaagattaatgtagcgctaaatggaaattcctgtgctccacatgcctttgttaggctccgcccacaaaaaacctagtgtctaaaactaagatattcacattttaaggcatattgtaagaaagttcttgaaattggcagattgtgaatatgttgtatatgtattttttcccttttaatgggaagggtgtgtgtgtgtgtgtgtgtgtgtgtgatttgagtttagtaatatatgacaaagtgctgacagtccccaagtgacttatgacttattttgggaaaatggattttctccatatgatttctctttgtatatcttatataaaatcttttatcttgtagcaggaaaaaaatttactttcccttatatatgaacaatttcaagaatttggaagcattccaaactttacagtttaaacatagatttcaggctgggcacagtggctcatgcctgtaatccagcactttggcaggctgaggcagatggatcatttgaggtcaggagtttgagaccagcctggtcaacgtggtgaaaccctgtctctattaaaaatacaaaaattagctgggtgtggttgcacacacctgtagtcccagcctacctgggaggctgaggcaggaggattgcttgagcccaggaggtggaggttgcaataagtcgagattatgccactgcacttagcccgggctagtcccagcctacctgggaggcaggaggattgcttgagcccaggaggcggaggttgtagtgagctgagattatgccactgcacttagcccgggcaacagagtatagatttcataataaagattcctcagactgtgcaaaacaaaatgtagatttttaactcttctcagttagtactctttctccttgaggaaaccaagtgggagaagacatagagacaaataatattcagaattaataaaggtgtagcactaagtcgattgtttcctgtacttaaatggttatataataggaaaaagacatatgttcatataaactctcagggatttatttttaaagagcaatctcttctgtgtgacctgtgatcagtagacgttaaactcaatctcttacctttatgcctataatactttaacaattaattgatattcagagtgatggctgaattagctaagcataatcaaaaatgtaattatgctgggtaaattgtaattcataaggctggaaagcttaccagtagtggccacagtgattgaaatgagactcccccccccaaattttcagttaatcacatgattgtattaactaggatgacccatttttagagcatctgtttctgacaacttctaatttgtattactctctatttcaacattctgtttattcagcagggcctgataaagatttttagttcatgtctcactatatttagccactccttcactgcagcctgatgacataatgacaacaatacatgagcatcaggattttacctgcctctgcatcagaaactgaagccattggtgtatgtttctctgggccatttacatgtcttgcctgagtatttcagaggtaaacattgtatcccttttgagtgttttgagtccaccaacctatagggacataactttaaaaattattttcaataactaacattttagtgtttactggtcctagcattgagctaagtatcagctcattattttcaaattgtatgtaaccacccatttggtgggtaccgaattcaattcagtaggtagcaaccagcttaaggaagaaaaccagaccaaccatgaaatagaatataacaaaaacaataacaaaggtaatcatacattttgtagaggaagagagaagtattgtttcatgaaactttggttttaatggaatagatttatgtatccttatatgtctgtgtactgagtcacaatgcaaaaagaatttctaactgtgggtctggccaaaaatatgggaaagttactatacttctctcatacaatgtttgctataaatcctattcacacaactttataagctccaagttttttctcttaactattatgtcgtggcacttcctggtacagtgcaaagagcatagagtttgcgtaatttggtaaatgagtaatttaacttatatagcctgtttccttatcctcaattcgtgtataatttctggatatttacagggttgtgagaatcaaactgggtaatttatgttggatattcttttccaaattgagctacacatatgtaagttactatgattgtaatgccttgccctttggcccttcaaatactaattgactactgggtttgacttaggaagactggattgtcttttaaaatatttttcgaacctgaagatttacagttcagtgttttcacttgtagagatcagtcctgttgagtactttttacacagtcttttgtttcttctttatgacaggatgttgtgaataaagctaaggttttttttttatttacttttcctattttggtattactcttgacaaaagcaatggaaggcaaatgtactttggacatacctgtatgaactcattattcacatttgtcttcaaataaagctgcattttgattttaaaacaaaataacactatgtaaataaaactcgatttaaaatttacgttgaaatacctattgtgatactcaatggaacattgaaataattttgaccaataaaaatatatccaagacttaacaacaacaaaggaataaaaaagatacacaaaacctccaatcaactgtaaaacttgtgagtagagatatttcagtaattgaaaatagctagcagagtagctgtccgctgcctgtcttctctctctctgccattcattctatttatctatctatgtgggtatccagctgaattttttgtcaagatatatgtttttattccatatttattctgtggcctaatccaaaatataatcataaaaatatatattttacattttatgtatcagtgtggcataaccttataattcagtatatatcctgaagactttgagttatgcacattgtcatacttagacatagttctcaacctttagaggatcagacagttatctggacagaggagcattgatgccactgttctccagcattcccttagcctcatcttgctaaaagcagaagaggatattgggatgcaaataaagtagaggaagggctctttgccaagtgctgtttattgaactgagtaaacgtctcccccatgggttggagggagctggttcgtttaagtgggcaagaaaagccagtattcttccaagtaatgaggtttcttaaataaatattccaaatgtagattctctgggctgcatcaacaaggggcaagcctgaaaagtcccctcagtatccaggagcccaggttgagaagggttctgttttgaaactggaaactgtccgtagtttggatgggagaatgcttggaatggaagctaggctgtgatttgtctttttaacattcttgacagaaaaagggtgttaaggaagcaggatgactacagtttcaggggatttatttacagctcctaagaaaattaattgtttttttgcttttgtttttgtttttttttacaactcagacaaacattatgctaatagaaaagtatctaaatctactcatgagaaaaattctttaaggatgcatattagtcaacctgttcttaaaactacttattgttaaaaatacttcgtaatatacacaacatattcttttaaaatgttctacagttcagattttaaagtgattcgtagtcatctcaccccacctccagttaatgagattttactgtttatttgttagctacatctaatagaaaggaaaaaaaaaaacaacctttttgataggtgataattacttaaaaatttggatccaaattaagagaacagagctcatcaaaatatggatgtattaacactggaatgtataataatgggaaagaaggtataagaatgacagagtgagaaattttaaaagaggggaaataggatgaattcaatcaaaacaaggaagccaaggtgtttaaatgggtgaccctctcactttgatgtttatctgattgaaatttgacattttctatttactcatttcaaaccaagataaaaatctcaagtatttaaagcaacctattttctgtctagtttgtgttcaaattattattattattaaagacagggtctccctatgttgcccaggatggtctcaaactcctgggctcaagggatcgccctgcctcagcctccagagtagctggtattacaggtgtgaaccactgagctcagcataaaatggttattttttaagtatatatagccaggcataattaaattaaatatagtttaaaagtgagtttaatgttatttttttcctcctcttcctgggatcataaaatgattaatgttaaaattagtgttctgctactgactggaacatacatgtttattatttccctctaatgtgaacacttgctggtagtatagaatatagtcatcttcaattccgacagttgacataaggcaattttataagtgattaatcacatactattgtgcatgtaggagggttttggcttagagttattttggtgtactttttggatgttacgatttttattttataagtaaactcatgtttgttacctgtaatgttttactgattccagaacaacttggccttctttggtttattgtaatgccaagcacaattatattttgagtaagattttgtgagaaaaattatagtcttcttggtttataaataattgtgttatgagagtaattctaaaagccacacctgaaaatgtcacattacaacatcattagtttattataccttgtgtaacacttttgcttttcataaaccaagaagcaattagagttagattatacaatatttgtttagaagataataaatcttacaggatgctaataatttaaaaagctgcatatgttgttactaatgatcaaactgaaagaaattatatgatttcaaacatgactgtctttctgatcgttcaggacaggaccatgtaaggataacatctggacctgatctcacatctcaaggtcttaaagttgtcacttcacttaggtttaatattttatcttaaaaatggttattcatcaaatattcattaaatgctaaccatatttacaacattctgcgaggaaccatagggttacaaagtatatgacaaattccttagatataatatataataatcagaggtggaattttacaattattattctctattctctactttactactggactgggttttaggactagcccccatccctgctctacttttctgccttaagatttagggaaatgttttttctgataatcacattgctggaatctaagatgggcttcctcatcaagtttgctttttttcttgagattttgaaagacactctcagtcttcagctgtatattgagcaccttcactgtggcatgctttagggactgaggtcatagtccttttcattgtggacttttcatcctggacttttacagtctggggtagatggatgtgaaacatatacttgtcaatatgtaatcctaagtttggaaagtccagaaaaaaatatagggggtttagaagaatgtgtcttacccaaggagtgcacaggaattttgacattaggaaagctaggcaggagatacaagcaaagagtcccacctgtgtgaagacatggagactggagagaatgcggtgcattggagagaatgcagtgcattgcagcaactgagagaagcccactcactatggctggggaagaggcgtgaaggagagtctggtgagagtggccaaagcttcaggtaaaagccagagcatgcaggaccttataactaacgatgacgacttaaaggaaaagacatgatcaaattttcataagtatcgccctcagtatagtgtgaaaaagggtttggaggggccacgtggattttggtgagaccagttaggaggacattgttgcagtctaagtgactgtagggtgagagaagtgtacaggtaaaggtattttgaaggtgggagtgatggagcatgctagtagatttgtggggacttagagagagggaaggatgagagatgctgcctgagtatttggtttgaactgtaacatttaaggaggatttttttttttaggctcttgcctccacgaggatttaaaaacaaatttgcatattaccttttccttacagttcacataattccttttttaggcaacatggctatatattcttttatcttttccctgaaattgcgtctcttattaagatttaaagtatatatctatgtacatatgcatttgtttaaaatgtagtcatttaaaattcagttctaaacaactgggtccttaccccaggcacctttctatattgattctcctttaacttccttgagtgataagctttgctatttttgaagttctttgcctattcactttctcttctttagactgtgtatgaatggatagatacacacactcacccacacagtttgttttaaattgcacagagttgatgtataataaaatatgaagaaaggaagaaatatttttaaaattcttatattttctttagtggtttgtcttagaaaatgaacacataccggagagttgagaactgagatttttgtttattttatttatttattttttgtgagaatagcaaaggctttacaatgtgactgcttactaatgtcagaaaaatagcaattcagctcttactttctcccctatactttcagggcgttatgacagttttaatgtgagttgtaaaatgtagggaggtatactctaattctctttcacacacataaatcaagtttcaggctcttttggaaatgtttactagaaaaaacatcatgggcagattttaaaatgcttttggattgtatgacggcgtggtgccacttccattgaagtgttgtaatattttattttccttcccaaagcgtcaagataaatcctgtaaacattttttctccttttgttgttttggttgtactattgtgtttggctctagccttttgcccccagggaaacaaaagtgtttttttttaactgcagtgctcccgctgagtactccagctgttgggcagcagtttcaaagttgttccctatttacacactgcaagtctggcggatcacaaagcttcctacatcttatctgaaacacaatatactaatttcagggatatatttagaaggaaaattgttgtcaaaatttactataatgtagcttattttatcttttaaatttaaaatctactaaatcattatatctttaaaaaatggtgatggtgaatgtcagcataacacgtaatcttatcgaaacaattaaaatttatcaattagcaggttcaagtaactacactttttttttttttttttttttaagatacagggtcttgctacattacccaggctggagtgcggtggctgttcacagttgaggtcatggctcattgcagcctcaaactcctgggctcaagccatcctcctgcctcagctgcccaggtagttggaccacagacacctgttctagtaactactgtttgtctatatttaacgttaaccaatgtggtaaaccactagtgtgtaccagcactatgttaggctttgtttaggttttgccctctaggagcttcagtctgtttggagaaatggacatgtagataaatgttataactcacgtagaaatgaagtgcttagagaaggcagatgacagagttactggctgtatctggagaagttggataaagcatcatagatgaggggacagttacctttggagtttccagatgaagagatggaggaaaagtgccttgatgacaccaagtcacccattgtgcttgtttaccatgtggttaaaataaagcatttgcatttggtgatttctaaactctcttctagttctatgaattgaccacagtataagtatagttgtttctgtgtgtgtgtgtgtgtgtgtgtgtgtgtgtgtgtgtgtgtgtgtgtgtgtgtgtagggggcgggaggtactttttttttttttttgagacggagtctcgctctttcacccagctggagcgcagtggcacgatctcggctcactgcaagctctgcctcccgggttcacgccattctcctgcctcagcctcccaagcagctgggactacaggcgcctgccaccatgcccagctaattttttgtatttttagtagagacagggtttcactgtgttagccaggatggtcttgatctcctgacctcgtgatcagcccaccttggcctcccaaagtgctgggattgcaggcgtgagccaccgcgcccagccagttagcggggggtacattgactgggcttgagatgttcgtatgtaataaatttttaaaaattgcagttttaatttccagtttttagtgaattttggtcaatagaatttgctcttaggaaaaagtaaaggaggtgaatgctggctttcttttgcaatagaaacagccaactcactcattcatttaacatatattgttgagtgcctaccatgtgccagatattgttagagagcaataaaaacacatattccggcttctaaaatacttacattttggtggcacatgggacaccacactctggattgggggaaaatttggggtatgggttgccacaaaaatgagcaaacatcagtgtctcctgccctttccaaaaagcacaagggggctatccaagagaagggagaaagcaggtctaggcttggaaaggataggtggaaagtgtggcactagcaaggggtttttggaaggcaagggtttccatatgcaaagattgggagatggagtatttcagctgaagagaaaacttaagactattttcaggccaaacagtccaacttgaagagtgggttatattcaatagagtagtaggagatgaattagatactgagcatgaaaataacagctatgaacttgtcctcatgccaggtgctgcggcaagtgtatttacttattaaatacttcaaaatcccgtaaaataaatattattgtgtctccatgttacagcttctcttggggccatatgagtaataaaagacaaataagtttcaagctcaggtctgtctgatatagaaatacttgatctcaaccaccataatatattggaattttcatttttggatagttaggctacaaggttctcttgaaaattttgagtaggcagttgcttaaatatgtacaatgtaacagtatgatatatcccataatagtgttagatttggggtattctgggaacatgctgaagaggcaaactactcagttgggggtggatggatggaatttgcctaggaggggatatcagcattgagaccaaagacatagagcagttatcagagccaatgaggagggttttcttgatagagaaggcagcatgtgaagggcccagaagtacggtactaggaactgctactggtatctttgaagattctgtaatagagatgaatgtggcaatttgttgggactagatcatgaaacccttgggtgttatgcaagggaatgatgactttatcttggaggcaacctgatgatatggaagagttttaggcagataggcaggggagtgataggatcagacttccacaattagaagattatgttaaattcatttaaacaaatgtgaacagtagtgaatcaattcccaggggaagtttcattgccaagtattcttcctgccgtgaagattagcctgttagttaccaagccgctttcgttttcagtgtctgtgcttgtggtcggtaacttttgctgctgttgttctgctgctgtctgccattccattcgccatctatcacgcacacagaaccctggccaggatcatgaagggcgattgaaaaggtaacaagagaaaaaaaatgatagattaatgtaagcctgatgtttgttttagtggcagattttggtgttcacatgagtgcctgagcctgtctaaattaatctcatattctcaccacagtcttctagcttgagaattgactgcaggtaaaaataattggaaattattggtgtagccgaaactgcattacagctgccaagtgtggatacaccggagccaggctgcttttgtctgcttcctcataaacattctttccgcattctttatcagcacataatcctgagacacaaaaagcctttgtgtcccactgggaatgtgagaaaatcaaagctatctattggttttgctcctgttaggaaccactaacatttctatattaaccacccatgttttgaattgagatagatgttatcagcaagatgtgtcctccatttatccccaaagatatcactgtcccaatacaagaaatcttaaagacagactgcaaatgtctgttttcatccacttgatgctgtgatttgtggatacttgttagacatgtgaatttaatggggcttagcctaatagtaagcatttatatagaacttcccatgagccaggcacttgtatagtaatacatctaatcatcaccacagtcatgtgaggtagctattattgttttatactgtttgttatgcactgaattgtattccccaaaattcatatgttgaagccctaacccccaatgtgattgtatttggaggtagggactttaaagaggtcattaaggttaaatgatgtcataagagtgggccctaatctactatgactgatgtccttataaaaagaggaagagactccaagaatgtgtgttcacagaaatgaagacagaagaccagaaggtggctatccagaaatcaaggagagtcctcaggagaaaccagccttattggtatcttgatcttggactttcagcctctggaactatgagaaaattaattaattatttaagccttcaagtctgtggtattttgctatgttggccctagtatactaatacatacacattttgctgtgtgggaaaatgaaggcacagagaggttgagcgactgccccaaggtcacatggctagaaaatgacagaattaggatttacacatggggagtgtgattgtggaatcaatgctgttaatcaccatgctgtactgcttctcatgaagacagaacttcccagtattggggcctgggcggtatgaccatattctgcctctggcatctttcctccccttattttctgtacccagccctctgcgttctagtgtataatactcatggactgttcaccttgggctatactatgtaggaatgatgcatctgcagaatcctttactctcgtcatggttggcagtttgctctggtttgagcaatttcatggctcagaataagtagggtcagcaaacatgttaacatttttcttgtcacgaattaacttttcaaataacagcaaaactcagcttcatttttttccccagttttagtctcattgattcagtaaaagaatgcttttgtagtctattcttgactgtcatcttttggaaaagatttttttttgtgaaaggacaggaagaagaaaagaggagagaaaagcagttgtttgaattaaagtgaccatgttaacacctatgactggtctgatgaattgagtactttttaattacttaaatatgtttagtatgttacatgttttaaaatagttcttaaaatgtagtagcgttttttcgtagacacttaagcttcagcatacctgaagaaatgatacagttgtaaaaatgcaatacaatgaccatcgagggtgagtaagtgtgggaagcttcctgaaaatgcagatgcagaatggattatactgcatacatatctacattagggttgatctgggaaattataaaaagtttatttctgagctcattaaacatttcctgcaaatttaaaattgagttggttgtataggaaaacaaaacttataatgaatacatggactcttttcctgatcctccttttaatgaggtaattaaatgaagaacagacaatgtgtacatggccatgtgcctttcatatagtgtaatttaatacagatacatggccacatatgaaaagaataaaattagattttattgattttatattttccttaattttatatgactaagagagttatatgacaagtattgtttaatttctgaaaccatgttactatcactttagttatcatgattcaggccggagcatatgcatcatttccaggtgaagtttgttccagctcatggatcaagccattatctgctctgtgtgcaggactcttaccaggataagaagaaacaggagaatgcattgagctttactctaaactgtgaaaataaacataaactgcctttggaacaatttatgcagtttttttccatcatgaagccaatttgttatctatttctgcatatcagtaaaaacatgttccttattcaaaataaaatatttctctttatatgttactttatttaatacctgaaggtgcactcctcaacttatggcactaatattcgttgctgtggaaatattttcagaactcaagtttatgatttgtggaaagtgtactagagaatcacatgaattattaattaattattttttaaagtatgcttttttctcctattcatggtaaaaataaagaaatgtaaattatgagaaaaagattattttaatatatggtagagtttttttctttctcattagagatcagtggctttatagcttagagtagtttttcttattttttttttgtgtgtgagtaaacttatcctacttttaaaacactctatttgttggtacaagctgaaaaagtatttattgcattttcttcatagttgaaatttacttttaagaattccctttagatttcaaagaattaaatgacatttaaatttatttattgcaaaacttcagtaccattatgccaacttatgtatgatgcttttcttcttgaaccatatgcctttactgcctactgccagaaatcctatggaggttttgctctgagcactccagtaagcaattttggaatgtaattatccagcatattcaacaagaaaggtgaggtggaacccttatttcaaagaaaattatctgcttttgtttatgttagaaatcgcgtattctattggctcctagagagtaggcatctggcttgtggatgcccagtatctattctccattctgataacagcatccagattttgctttgggaattgtgatggttaatatctagtggcaacttgatcggattgaaggatacgaagtattgttcctaggtgtgtctttgagggtgttgccaaagcatatgaacgtttgagtcagtggtttgggagaggcagaccctatgtctgggtggacaccacctaatcagctgccagcgcagctagaataaagcaggcagaagaaagtggaattaacagagttgctgaattttctggccttcatctttctcctgtgctggatgcttcctgcccttgaacatcagactccaagttcttcagcttttggactcttggacctgcaccagtgatttgccaggggctctcagatctgtggccacagactgaaggctgcactgtcagcttccctactcttgaggttttgggacttggactggcttccttgcttctcagcttgtagacggcctattgtggaacttcaccttgtgactgtgtgagtcagtactccttagtaaattccccttcacatatacaactatcctattagttctgtccctctagagaaccctgactaatacaggaatctacacctcattgaatgcggttttgggggcagaaaagtttgataccttttcttactggtgataaggctctcatctgaccgctcctattacaaaagacaggttaacaagagaaaagcatagcaaatgtatttaatcaagttttatgtgacctgggagtcttctgaaatgaaggcccaaagacgcagggaaaactctatttttattcttaggattgatgaagaatggacactcccccatcactctgttactattagatcattcccttttgtgaacacctgtctgttcattcttcttggcctttctgtagtattgcttcctcttgggtatgctgctggacccgccctggaatgaggctctttagggaaggatggagaagggagagggtgacctttctgggttttatggcctgttttggaggagaggagttgccttggggaaaacaaattttgttttctatgacttgcttcaggggagatagagggataggagacagaagggcaggagaaagtcagaataaggctttgcttctgaggctgtttttgaggccttcccagtttcccagtgtgccacagtgccatacttctgtgtcattttctgaagcccaacacagtcctggagggactttcggtcaaggtgtcctgccttcttttatccaggaggtgggttcctgagctacaccaggaaaatatgagtcctacttcagaaagccatcctctcacaggtagtgaacattgtaaaatttaaaatgtcagcgctcacaacatgcagctttcctgccatgtgaaacaaacagtagaagagaattagggagaggaactggaggtactctgccatgttaacattccctggttcagttgttgttgagagctagcttctttcttgtgtatcctgtggtttaactattcaacatttcctttgattccacaagtcaatacattttttctttttttctgagctagtttcagttgaatttctgtcacaaccaaagtgatatctatgtcaattaaatattttttctgtgttcatattcataaatcctccctccctcccttttttatttttttcctttcttccttccttccttccttctttccttccttccttcctttctgtctttctgtctttctttctttctacaggatctgcctctatcacccaggctggagtgcagtggcacgatctcagctcactgccacctccacctcagcctccccagtaggtggatgctgcaggcacatgcctccatgcctggctaatttttgtatttttttgtagacagggtttcaccatgttgcccaggctggtcttgaactcctgagttcaagcaatccttcagtcttggcctcccaaagtcctgggattacaggcatgaaccaccttgcctggccatattcataaattatttcaataattataatcagagtatagatataattgtgttttctgcctttttgaagtaacatgattttttcccctaaactttttctttatgtttgtcataaaaaccatataatatattaattggtgtcatagttagtttaccactttatccatgttactaataaatacttgggatttcaaagcagaagagggatgttgacaaggtccaagaataaacagaatggtgcttctgctggaactatgttattaagtaatacattaataataatcagacaagcacaccctttttattagttttttaaactaaactaactaaaaaactgtcaccccctttttattagttttttttaaaaaaacaaagataacagaattttgtgcatttttggtagtattctgtgggttaatttttaacagctggattattgagaaaatatgaaactatttaatgaacatacattttagaattcaactaaaattgaacacaaatgtaaactctgccagtcactacttaagtggcattaattaaacaattgcttcttgatcaaaatgaggatagcttgtcttctgactttgttataaaaatgaaaagatggtatgtagattttaaaaagtgtgtttatcactcaagaaagacgctgatttttctttgttttacaattatttttcgtagaatcagacattgcttatctggtcattattaatttattacttaataacatatttccagcagaagctccattctgtttattcttggaacttgtcaacatccctcttctccttcgaaatcctttctttggtggtgattactttcagtcttggtccccttagaagagctactccatcgctcttccatgggctcttccttcattcgctagcattcctcatggggacagcaactgtgcaaaatagtcttcttttatttgcttcattttatttatcatagcaacacacatgagacacattatctctgtgtctcttcatgactgggaacttgcctttgtaataacagtgattgttatatattaggcattatctgtgtgtgtgtgtgtgcatgcattttcaatgaatgactttctaggtaaaacattttaatgatatagatctatgtaaggctacattggcatgagatgccaggagatttttccattcactctgttttcttcccagtgaaagaaatggttgaaaatctgatggcagcagaactacatgaagactaaatagcacaatagctggttacttacttagaacctgatgataaatttgtgatgtgtactaatataaccaactgttctaaatttttaaaactgattatgggttgattgccacagagtcataggttaacatttttgtagacaactaggtatttctgataattttcctaatcatacagttgaattgtaattatatagcttgtatttatttgtgggtagcattaaaactgcgtataatttacatttggtatatggacctcattcttccttttcattgtgggttcagagacctcagtctaatgcatttgatcccatgtgcctcctgttgagactgtctgcttcttaaaatggaaatttaatttttatgatatttgtatgtgttttgaagcaaattaaaattatagtagttagagttgtggatttgatttgcattttctgaaaggaaaggaaactattgagtttaaaaatgtgattcgatttgaacaaactatgctaattaaatttattttcaaggacactattagcagaaaaaatataaattggtgcaattttccattgcctcattttgtatttcagaagtataattcaacattttctcaacactttgtttttaaaataaagcattaacaaaatttacaagtgacttatttgtgttttaaaagtttactttataaaatattagtcaggaaatagtttcttccctagtttacttgtaaccatggggacaaatatatgtaagtattatcacttgataactggctcaacaacaatgaaattagcatcacaaactcagacttattcaaatttgttgaagctagtttaaagcctctaggtagaaatttattgaaggttaataatttactttaaaatttaagattacaaacaggattgaaattaacctgtagcaagcattatgttttcaaaatagttataattttactgttggggtttaaaatcttgctaagcatttatcattaaggcttctagagaaggaagtaaaaagaagggttggtggtactgaaacctatatttttgagaaaacataggtttgctaaaagatcactgtactttagtctgtcttcagcataatttaggaccaagggtgatgaataagtccattaataccaaatgagaaaaaaatgggggatttttgtttgttttatttgatacacgtggtaaccataaggtgtctatctaggatttaccagttaattatatttgaagggcactttggtcagtagctaggatatgtttctgaggaattaagggaaaccagggatgcataacagaaccacgaagaggggaaaatacatgggaaaggaaatgactgaccctggaaattattaggacatcctgcccaggatgtcattactaaatctgtgttccattattttcataaaaagatatcatctatacacaccagaggacaatggcaagcagacataattgggctgtgaacatttcatatcacgttagcctagtacttttaattagagtttcagtttaattatagtataattctaaactagttgcaggcactgactatctgatgagggagtgcagagattttatttgggacaggttggttcgtcatatcaagggatagctgtgattgggtgcaaaatgacattgaatgcattgtgcaatgtctgagacctgagattaggggaacgtgtcagttcctttagtcacattagagttccattactatgttttggaccttcccttgttcaccttaattaatacatagttacccagaaagagagtcaggttcaatattactacactttacctatgcaaatttataatatcagagggagaagaagatgaaaaggaaatgaaaaatcaaaattaatattatttttgaattaaattatttttataagaaacatgctgctttttgcttttaaacacacaaagtagcagatgtaaatgaattaataggataaagcaagttgctagaaaaaaatacctctcataggaagtaaaatcagaattgtattattgaattaaattattttaatgaaagacatgctgcttttttgcttttaaacatttcgagtggtagaaacaagatgtaaatgaatttgttggataaaaaaagttgtagaaaaaacacgacttttgtaggccttgataatgtaataaggtactactttgctcaaacttttgaaaataaatagataaattgctgggcctagtgttgttggcattactacactgttgagggcttctgtctaaatatttaagagacattcagattagtataattttattttattaagaatcatgcagctaaggaagttagccttagttggcccagctaagaaaaaaggacaatgttggtgcatcaagtggttttatgagcaggataccacctggttccgtgctctgacttcatttgttgttgtctggaataataactcttcattggcttaatgcctttgcttgtaagagacagatgctatctgatccctcctgtcagaagaattcccagaataagccattcaaccaagaacaattgctgtcttgttgattgcaaacagtagaagagggaattctctgtatttcctagcaccttgctgtttggttggtgtgtgttcatcagtagcagaaactgttcactgaccgacgaactgaagtggtacatgggtggcttttgaggcgcttttctgtgatttggctgttactactttgagttaacttctcactatctaagatgtccacattgctagtttacttttagcctttccattgagtctgtttcctaaagtatgtttctatccacctcttctggtgtataaattttattttaaacaggtctctgtttctagtccttcttttctttctccaccccttttcctcccatgtctcatgaccacatctcattcataggcaggattttctttaaggccgctcccatttcagagtagcgtaagcaatacattgtggctaagaacaaatatattacagtgcaatatgaactatgagaaaatgtaaacagagatgcaactccgaaatgtatttccaaattcactgtaggcttgggtggatattatagccctgcctgtttcacttatacttcacgtcttaaaagatctggggaatgttttccaacatcattcagcacagttctaggtctcattagggccggcagagtcaattttcttgtttgaactgctaggggcaagtcctaaaaacaaacaaccaaaaagaaacagtgtaaattgctaattcgtgtcattgcctgaaatccatgcaagcaggattcgttcattagttcttatttatttatttttgggatagcatatttgattagaacaaaattcagttctgagaagaaaatgtacggtagccaaacagttcattttagaaccccccttcatttagttagccagcctttgtagtgtgcttgttttctgcaaaatgttgtctatgtagtcctggaaaagataaaagacctataagacccaattctttgaagtatgtatgtcttgctggatactcttaaaatgtatattcatgaaagttcttggtagaggatgaagactacctatcaacaagtcaacagtattataattataattataatattttcaatcagaatatctccaaggcaactgaggaatgatactgaatcaggtcaagaaagagggaggtagatttacaactagaggagaaaaagatgtggaagggattcttaataaaggaggtcttgataccacaatccctgcaatacaatgttacagtatcacatggggaaacagacatcattatggtaggaaaataatgaattagttggtcacttaaagagtgagtttccattcatttatctaatctttgttcatcatcttgaaatctgcattggttagtctattggggagttttgcaagttgtaaacatccatcaatgtaaagcaactaaaatgcagagcatttggtatgcaaaattgcaaatatgaaaaaagatatagaatttcatattctaaatcttggcaatgaggtaagggaagtggccagttaacagttgaacctaaataattggccacatatttcatgttaacagctgaatgaaattaaagactatgtatgaatgaagaaaatacattttcaaaattacttcaaaagataaggtgtaatttgagcttttagttttttttttttcctctctctctctgaatttagaattgaaaatgcaaacctatttgactctttatgggtcttgcagtttgttctcagggctgtaatgtgtataaaagtaaatgactgtccagggtatggtatgtgtaccaatctagtagcggagatatgttggtaagaatgtgacaaagagaatgacttaaggaagagggattatagcactgggtaaagagaagtgaatttggagaagcagtgaaagtatttttaatggcttgaatagtacagtgtaagattttaggttttgttccctgtgatgtatgaagagtgggccttggccatgggtggctgatgtggtattggaagcattctgataaagtgggcagaacactggactggaagtcatgaaccctgggctttgtagccttggcttcacgtccaattatgtgaacttgtggaagttaattcacctttttgagccttagcttttcatcaggaaaatgagggtgttaaactgctctgtaagatgccttacctgttgtgtgaggttattctgtcaattcagaactgagaagaaactgaaggtgtgtggatgagctagggactaactaattcatatgtgaggaataaggacatgagctggaaccacatttaaaattgaagaggaatggatagagcacggagatatggtggaggtggaaatggtagttttttagacaggacgaatgttgataaagaagagaaagagtcacaaataactttatgagcctaggggtttgggaggacaaaagtaatactgaagattacagggaatttaggaacacttgcttattgttgggggaagaagagctcaggttttcacctatccaattttagttgacatgtgagtgagatgtcctgcaggcatctggaagaacaagcgcgaaaggggaatgagagaggtcaagcctggtgatggctcctgggtttcagccacagtcaggctgtcattagaacagaaagtggatgagaacaatgagctcactgaggaaggaatcagaaaaaagaacattggcctaaggtgtggtattggagtgggagtcggggcagcactttcgtgtaattcagagccaacatgtctggaagttggaagtcaagggcaaacatttagagaaatgggaaaggcaaagggaatctgagaggttcagaaagccaccactgagtttggttatgagatatagtaagtggattctgggcaactgccttgagccttgagctatttcttgaatattgaagtgaaagaaataattttgtggaggaaatgaagattataagaatagagtgcttattttaaccaaaaaccagaagttagacattctagcaagtaggaaaatagtgttaagtaaaattcaagacacttaatttgtttgctgtgagaaaagaaaagcttttttctccttttaattctgctttcaacgagcaattaactatcccctctaatcatttctctttcaaattctacctatactggtttaccatctatccaagtgaagcatctctctcttaggaaggcagagagtgaaaacctatgtgtgaaacctctttcttaatactcctattgcaattaaaaatgtaccccctcccaatctgtttactacaaagaggccctatgccagcttggtgtcatgaccaccatctgtaaacactatgtgtgaattaagatggattttgttacagtgaaatttggacattgactgggattgagtcaacatggaattttataactccatttagttcatacggcttaaagcaagctcgcagtgatctacatgaggatggccaaaattactgggttcccctccccctaatttttagtgtcataatcatttcagaaataaaatgcagaattttttttttccatctgagacattgaattagttgcaataactttgcaccagaatcatacagttttattgatgctggggaagtaaagccctagtgaactgggccattgaacacaccataaactttgtggcaggacaagttttctgggctagtcattaagcacccttttttcaactggaacaataccagctacactctagtagagtcagtgtttgctgaggctttattccagcttcaaatctatccccctgcccactgagaacatttggcttgctttatagctctctagggaggagtgggagcccaggagcactggctgaggaagagtcagccagctggatggctaaggtgaagttggtatggagctggttgctcaactcacctgtgagtccaggaagaggaagtactataaggaattttgtatcttaggaattttatttcctagcaatatatcttaacctaaaactggagatgcttctttatttgcctgtaaattagcaaaactttaatattgtcttaccaattttatttttgtatccataatactgcttttctctgatatgggcaagtgaaaatgaaagtaactgaaaatgttctgctgaatagcaaacacccaaggcatcgtcatctttacttttgctaaaaaacaaacagaaaacccccaaaactcacatgtatttgaaatcatctctttccgagagtggcagagtatcataaaaatccaaaatggcctgtgcctatggtcttgttttgtaacattattttgtttgcatttgtcagcatgaaggtcactttagggctacctgaatatctgtattgcactctccagtgtggagagaagaccaaagaaggttagagcagttccggaactagcacatcaaataaaagtaccaagcagtacttgaggtgtggtcagctgcaactctttgcagccaccaatacttaggcacagtgatgggtccagaatggatccagtgagaaggcaaaaaaggaaggtctcatgtatttgctggtattctatcagaaaacaagagttaggaaggagagtgtaagtaaggcatgaaggagtccatgagccataagcaaaatcacatcaatttttaaactctttgatctttgttctgctttttttccccactgaatggtagatatcagaacactatctccaaagattgtctgaattaattaattcccaagtaggcaggaataccaaaccctctctttcaatgagtttaaatgacgttccacacatttgccctaagtaaggtgatacttaaattgtatctttacacgtattgtgcagttcctatcctaggcctcttcattttggtggcagtggcaatggcatatggagagtgatggctggagaaggagttgttaaattatcctcaaaggcctcagaattgaacattgtttcttatttctgtcctatgaaaaaagacggattttaattatgatctttttaaaatcaggttgggtttttactaataaaaaaagtcagtgtttaaattgtatatttgaatgttttctctctacatttttttaatcacaaatatcagctacatgttacacagtttttcatttcttagtctttttgaatgaaataagtagtcttttctttggtgcttttaaatactattagttgaaacttggtggttattcttgaaatttagcttttagaatttaatttattctaaagtgtacagaaaagagattgcaactttgtggtgaatgttgaatgcagctatgaaaacaatgttaccttttttcaagatctcttgcctagctataatacatctgctagttactaagtgtaactgtgtatagggtacagaaaagagattgcaactttgtggtaaatgttgaatgcaaccatgaaaataatgttaccttttttcaagatctcttgcctagctataatacatctgctagttactaagtgtaactgtgtatagggtacagaaaagagattgcaactttgtggtaaatggtgaatgcaaccatgaaaataatgttaccttttttcaagatctcttgcctagctataatacatctgctagttactaagtgtaactgtgtatattttctttaatagaatttgttagcttcctgaaataaaattagcttgctttatttgccacaaatttgttactttttctaaaatttagttcagggtaatttcacaccaaaatgggtaaacatttttatccttcttggctttcatgattgctctgacttcttcataaaatttggaaatcacgttttaactttttattgcctctttattaagtgcttggaaaacacatggaagcctttttattttacatactgtggtaacatcctagtaagattttattcgttttcactctcaagattgattttttttttttagaaaagcagtttagaaagtacccatactcgttgaaatttgtcatcatctagaccttaatatcacatatcctaagttccccactaattatttgcagatttccaggacttaaatatgtgctaaacctgaaaactatgaatgcatttgctgaatcaaaccaaaatgaaattgttttcttaactatgaacgagactaaataattttaaaacactactcagccacagtaaaaagagtgttgaaataaaactaaatatatatatggtatacacttgttgaactaagcctgctttattaaaatgactttatgattctccagtgtattgtttatacatattatttctaaagattcatgtttagctgataattcatactgcttacatatttttggattggttgacctcagacaacaaggatggtttctagcacacaacacattctgaacatatcatgagcaagatgctacccaagttgttttgtttgttttcttaaatatttaaccaacaacaaataaaagtatatattcaaggtactaatatgatgatttgatatacatatacatgtctaatgatctccacaatcaaatcaattaacatatctgtcttcatccagagttatcatttgtgtgtgtgtgtatgtgtgtcccaagatattgttgagggtctgattttatgaccccagtaaaaatgatggacataggctcttgatatgaggggaaaagtgctgtaaacacaaagactgccttatggggtgagagtgtagttcttgggtgacagaagtaaatctgtactgtgaatgtcctctttggagaattacaaaatgacatgatgactgaactgtaatggaaaacttgttttggtaagatatcctttctaaattttttttaagaaaaagaattctaagtgctgagttcaaagacttagtagaatgctactgataggaggattttagtgtcagtattaaatactgcacaaatacttgacactgaacatcgtgtataatggatatggccatatactgtctttttaaaggaagtgcttcctgctttttctccaaaatagcaacatatttttctcattagtgaaatgatggctctcaaataaatatcccagcccagtcctctgtttttcagcccagcctgtgcttcagatttacctaagaccataacccacagtgatgcccaggagtacctcaatctcagcatacttaaaagcaattgtattatttgtgcccaaccttgtttcttatgaattttgcagagttttagttacctaaacttgaaacttgccagttggccttggttcttcctaccttccttacatcaaatcttgcactgtctccttaaaatctctcatacctatgtcttctgcatattccagtactgatgtagttaagaccttcagagtatcattcctagaccgtggcagtagtctcctgtcttccactttagttgcacagataacatcccctaaccaatctatctttcgctgttctcgcgaagtgatctatctgaaataaaaatctaatcatgggagtctgtcttaaatgttcactgcctccctattgccaacagaaagtagctttacctctcaaatgttttctatgcacaagtcactctttaaaaatattatattgtataatccaaacagcaactaaatgaggtacttacctttattatcaccattttataaatgaggaaacaaatacagagaaaataaatacctggcccaaggtcacatagctgataataacagggccaggattcggcccaagcagtctgatgatagatgccctgtgtgtaaacactatgcaatgatacttctaatttcttagcttcccacaaaggcagggtttgaatttcaaagtgaaccaagagaggatgggcccattttatatcatcctataccaatgaatgtggcctgccttgccacactgtgtaaaggagattgtttcacattttatggtataaacttaatgctgaaaggcagtagttcttatcgcctgagttggtacaagtactaatggttcttaagctatttattacattgtatggcatcagttttagttgagacattgggtgtttgtaaatgcattcgcaacacccatacatgatcttttccttttagcagcatcttttcctgcccttgtgctgttgacagtttggggcatacattttgctgcaaagaaaaagataatgacagtgagcattggtatgaaggtatttcccttcttgcttctgcctgaggcacttgtgagttttcagttgttgcagaagttctgaaaacttttatattttgatggacagagccattgaaaaccttgtttcttgaagttaagtttgatttgagaaaaggagtatacagatacttatatagccatatgttgccaactccttgccatttattcagtccacagcttgttcttgttctaagcatttattttattttctgaggtcattggtttttctcctaggatcaggtgagttaggaagatcattttttttttccattgaagaatgtagtgttttctaggacacagttcaaacttttgtgaatgtcttaagtcagtttctgatgtttctttcatatgagaacccttcatctatttgatgacagctctcatgtcccgtgatgtcacctctgctttaaataaacattcatgtttctcttacaacatgactttcagggtttgtttgtttgtttgtttgtttgttttcccctaccatcctgctctccctttgaattaggagactcaagggtataattgaatatggtttagtgttacctagcaaaacactggcagtgatcttacaaataatttagttatcagtccctacaccttgttttattatttctcgagcctaagacagtggttattgcatgaagatctgtggcccgttaggttacatggaaaggagtgattcatgaacagactaaaaattcagattatacaaaatatgtcaggttttgtttttgttttactttgtctttaatgtttgttttctactttgtttattatagaaatggatgctcattctagaatgaaaataatggagtttcaaaaatgtagctttttaacccagtagtagctttacaagataggttttgtatgctgatcagcaggagattctggttatctgagtcttcagaacattcgttcaggcattctgtactctgagagactttaagatcatggaaattaagagttttgaaagttctcaagttctcaaaagcatccttgaaaaataactaggaggtgagtcatttaatatttctgaacatctgatttctgatcgtaaaaatcaattaggaaaattaccactttgcatccataatagtaaatattgatttgggaaagaataatcattggatactaaattggaattaatagaaatttgacagagagcaggatatttgcatggtcttaaagcacttccctacagacattttgttaattgcaaggcaaaaaaaaaaaaaaaaaaaaaaaatagtaaccatatagtggaaaaactgaatgtcaaaattaatatcactgaggggaggcagacagatatcatgtgctttcagttatgatactataagaacacaaaaccacttttgtagcattctggtgaagaatgcattacctgaatctcatcatgaggaaatatcagacaaatccaaatagagaaattgtctaaaaaaatacctggcctatattctttcatggcagtgtcatgaaagagaaaaaaggctgaagaactgttttgcattaaaggagatttagagatgtgagttgaaactaaatgccatgcaggatcctgggttgaatcctagactggaaattatacttaaaaaggacattatggagaaacttggcaattgaatatggactgtgaattatatcaggtgtttgaaaaattttaaaataaaagaagaaatacatattttagaatttgcaggcaatactgttgtctcatgcaacaactacccaattctgctgttgttcacactgctgccacaaataatgcagaaaagaaggggcatgattttgtcccagtaaaactgaatagatgaaatcaggtggcagactagatttggttcacaggtttgtcaaactctggattatataactgtggtgtatcaatgttaagttttcttaatttggcatcaatattgtgattatataagagaatattgttacagttggaaatatatattattgaaatattggggttaaagagcaagttgtatgcaaccactctcaagttgttttaaaaatattaatatgtagaattatatataataaatggtaaatagatgtaaagatgggaaatacatagtagaagatgttgaaaattggtgaacttgggtaagggatattcaggagttctttgtgttagtctcgcaacttttctgtaagtttgaaattatttcaaaataaaaagataaaaacaaattcagggagttccctaagctaaagggggggggtgtcaaaaattcagggagttccctaaactaaattggggagggtgtcaaaaaacaaaacaaacaagcaacacacatgtgcacacacccacttgccgcatgtagctcgggtgcaccacctgtgacataacgaaccatgtgaataaacagaagcaacacaaccgggcttctgaggcactattcaaataaaacacagaattaatgaggagaaaatttcagagaaacaaagaacagaattagaagcaaaagctcagcagaatcacctgatttcacttggctttatcctctctggagggaagaagcagccttggagagatggcaaggtgtggctgtgttgctgtcaacttctactttgccctcttgaactgtctccttcatctttccattctccaccctcttctttcccacctctcttttcctctctctctctcttttgtttctgcaaccgccttttttcagtcttcttattttctttggctatgttttattgcccgctcataagctggcacacagacttatttgcttctgctatgttcttattatacattagctcaattaaagtaattgaagagaaaccataatcagcatgacgatattcaactcatttgaaacccagccccaaatacagtgtgaaaatacccattgttaacttcatgcacactccacatacacctgttgggccactagcttataggtaaaaataaaaaagaatgtattttatcagtgagtccatttgcctggtccatttcacagccaggccacattctccttattaattgacctgcttttgttgtgagttttttttttttttttttttttaggttgttttgtatctagtgaatgcctttctgatttaaatttttcagtaatttataattgctttcctttaaggcttctcttttctcctctgtaatattatccctgtccatctctattgccccaaactgttcttggtaagtttctatcattattatttttttctggaacaggattgtctgagccttttcttctcatcttccctaatagctagaatcttctgcccattcacttttcccccccattcatttcctgcctcagtttctacttccaaatgtcttgaaaagtaaaattttattttgttgagtaaaatgtaaaaagaatctcacagtacttatatcagaaaactggatgccctgtaaaataccttgatgtgtggcatatttcttacagtggctgggaaaatgttgaatatatgtattctctgaccgttttcaactattggccatgactatcattttctcccaggaatattaaattcatttaaagcccagagaacagtgttgcataaaatttgcttttaaatgatgtccttcagtgatatttattgaaggcattatcatatattctaagaatattttgattctctaacttatagaaggcaacctagctcttaatgtaatgtgattttaactttccttgtcttgtttattttcagtttggtgacttactctctcctttaaaaaaaaaaaaaaaggaagaaagaaattcactacatggttaaatgcagtgaaaatgtgtactatagtttcttttttttcctttctttttaactgtggatgttaagctgtatagcccagacttgtaatagtttgcaggaaaggcttcttagccattaaaaaaaaaaaaaaaaaaaagagagagatattgtttcttcttctagataatgcctcattgaacctgtaaaatctgtatgttaagaattatttaaaagaaaaattctgcacaatattgatttctttttttgtcttgcctcttctgacatagaaaaaagctgcaggcaagtattaactgaaacactttctaagtttcaacaccaagttctcttacttgaacttagtgtttttgaaagatgatggtagtgctatagtaaagcagagactttgttagaggcccaaagtgaaaagcactaggctattatgaataattttgtgaacttacgttggattgattttaacatgactacttttgtttaaaaaaaaacgcattagaggttaagaaaacgatttcatagaaaaagtcaaagctcaaacaacacttcataattagcattcaggacacaaaaacacttgagaactctagaaaaccttagaacattccaataaactcatatatatatatatatatatgaaaactgagacccaaggatgaataactaattgttttaatggggtctgaaatagaccatgagttccccaaactacaagttatataagatggttagtttattattctgcttaggaataacaggatgtataatgttttcattgttgttagtttgttgttctgttagttgttgaagtatgtattatactagttttctatggctgctgcaacaaattgcaacaaagttagcggcgtaaaacaacacaaatttattctcttacatttctggaggtcagaagtcaggagtctcactgggcccataaaatggtctgcagggctaggttccttctggagtctgtaggggaagatccatttccttgcctattctagtttctagaagtcacctatctttcttggctcatggccctttttctctctctttaaagcccacactgtcatctcttttctttgctgcctccctcttccacatttaaagacacttgtgattgtattgggtacaccttggtaatccaggacactctccccatctcaacgtcagctgattatcaaccttaattcctctttgccggataacctaacatattcacagtcccagcgattaggatatagacacttgtgtttgttgggggcgcattattcagcctaccacaagtctaatctaaatattcacattaaaataaaaatatgacttgaagcagccaaagtcttatttgtttggaggcatagatatcaagttaacttgattgttttactcttctgtttcttctcctatcctcaacacttgtgctagaatatctctttaaagctactccagggtgttagtaaataacaataatataaaaaatggccagcattttgtttcattggatttgaaatggatttctatgttggaatatacattattttggaggtatttttaggttattggaagccgagtgcatcaagcatgctctctttgtgtgcattctttattaatttgtaacagcagcttcccttggcatacatctacagctaagtacacaagctaaccttttgtttcttgatagatggcttaatatatgctttctagctagataaaataaatggaggaaagcacttccttatagtagtcatttctgtttcttcaatgttagatactggtttgtttttgctcatcttgccatggatatagtgatctttttttcctacaaatgtgaaaagtacatttatcgttgctatcacctaaatacttcgtttcaaaaaattgtgagatttctttatcaatgggaacttctgtggaaaagaaacttaccctatgttggtgaaattgaatacattaaggtttttttttttttttttttgaaaaggtgtttaatgtgtatattgaatttccctggcttgaggcagtgttttcatttcgtacagagattttaggaaattatttctgattgaaacagaaacattggaatttgtcaaagggttagagaaatctctgactaaagcaaagtgccaaatactagttaggttagagaaaatttaggagaaaataaaacagaaccaatggaaatttgcttcttgggtgggtggacatgtctaaatatgaattaccaacatggaggttttggtgttgtccaccgaagtcatggaattgctggaggttttggtgggaaattcttttctgcaaatctattttagaaaaagttttctactcatgacaatttatatcaaagataatatttaacagtaatacaaacttgagaacagaaaaagtccaagtagaggcaaattccttgaaaataaacattactgataagcaatgttattgtattgtattgtattgtattgtattgtcaggctcttaaatgaaggccctaataaacttccattgaagagtttatttaactaaaaacttgaaattcaggatttgtgtgatgctgccagactgaaatttggtctaagattgtgtgtgtgtatatgcatacatgtttagtaacatatgcatgtcagcctgttaatattcctacaaattgtgagccccaaattcgtttgtactggtggctcaatcagcagttaaagtgttgccctctccatcatcaactaagatttctctaatcagaatagtctttatttatttatttgataataatttgtgtgtccactaattgccacgcgttgtgcgagatgttagacgcaggatactgaatataagcaaatgtggtccttgacctcatggagtttatagtgacactcaagtcaagaaatcaattaggtagttggatatataggtgtagagggcaaaggattatatctagattatggaattttaagaattttaatgggacagttacatttgcttctaattgaagctattgatactaaggaaaaattccaacatttaatggccaatgagaggattaatgggacagttacatttgcttctaattgaagctattgatactaaggaaaaattccaacatttaatggccaatgagaggattaatgggacagttacatttgcttctaattgaagctattgatactaaggaaaaattccaacatttaatggccaatgagaggactatgaatttgcaaaggaaacctacgagtggccagaaaggttggaagaaactagtaggtttacataatggaagccaagaacatgaagagaagtaagtgatcaccggtattgaattttgctgaaatatgaagaagagtgagggctgcaaacatgcttcgcgttggtgatatgaaagtcatcagtgaccttagacaaagtggtttcaatgacacagatctgtaagttttcttacggttaggatgtagttcttctgggagtggatatctaaactcactggaagtgaacatttgctattttgtagaattctcatctatgtgcagggtttactttcttctttttgtatgtgatatttatcttaccctctcaacatcaaactgagtaacattagcaagataggatttgccattgttaacactgcactaggccagtccaatggctcctgcttataattttagcactttgggaggctgaggcaagaagtttgagaccagcctgggcaacgtggcaaaaccccgtctatacaaaaaatacaaaaaaattagccgggcgcggtggtgctcacctgtagtcacagctacttgggagactgaggtgggcggatcaccctgggatgtcaatgctctgcagtgagctgtgactgtgccactgcagagcctggaagacagagtgagaccctgcctcaaacaaaccaacaaaatgcagttcactgtctgccttgatataagcataattttctttaatcctcgtgtccaaaatataatagtaaaagcttcttttgttatttttagtatcattcagttttagttgattctcaacttcagtctctctgatattttttaagggtttattcatttgtatattatttttctcttacatttcatttaaaatttatgtatattaaatgccttagctgaaaaatattgtgtgcatttctttgaagcatactctgccttttctgttgattcattttccttgtatattcaattaaaatgagccatattgtatattgtgtgcaacattgtatattgtaaaatgagtactcataaaatccgtttttctcatcccaaattaaaataatttatttttaaatgtctaaatatctggccatgcctactatcccccttgctagttattaggaacctaattgtcttgtgtttctagactctgacatttcaaagacctgaaatgcatctacttacagttgttaccctgtacctgtaggaggctcttgtacattatgcatagaaagtgcctcaaatataattgctttattttctagattaagaaaatctgtgttagaatattcgtctttgacaattcttgcctatgctattgtcttctttaagcttcagaactaatttgctttgcacttagtatggattgtctgacacatgaattaacaggtaaaatattgtatatccagtgtgttttttcttctattagatttctttatctgtaattgtggcattgacaaagacttggcagtagatactatgaagacagattcagccaagtaaactgacagtagttgctacaagaaaacattcaggaaaaaaacatttagtaatttttttcccttagtctgagtaacaactgagtaacaagtcatagtaacaagtatgacttgcttcctaggcaggcaaccagtgcagtgacacaggatcccaaattcagaagagggtccacacttggggtttaatatcctgttattactgtcttgaaatttttattaattttatctttgattttggttttataaatgaagccccatgagacaatgggccgagagcttgaggcttggaccctctgctcacatatggtctgcctcccatgcctcttgccttcctggggtgggttagtgggagcttgggcacaggtgtgggtatggttgagtttggtaagtatttactgagttatgatacagggccccaggtacctgtgagggtctctaatcacctcatggatagtcccatgcccaagagagcttgtcattcaatagcaaataaaaaataagtgacaagttgagagagacacctgggaagaaagataaaggaattcattttcctggtgtttgaataaaaggcctgcattttcattttgttctggacaagtgataaagtcagccctgacaattgttaatagtgaactagtgcttggaaacaagcttcacctttggaacttattgattcgtttccataatttttacattttttttaaacatggtatatgaatagatttggttgtacttagaaccctaaggaattcccaaatattttataataagaattgtctttccacagattaaattgtttgaaattgagctatttatagccttatagtagtaacaaaaggaatttgaatttaaaatatggatttgcaaaattaatatcaaagttttacaattatttttaccctgaaattgttgaaaaaaaagcaacttgtttaattaaaactcttcatgatcttttaaaattttcattttatttcatgatttagtgtgtgaagactttttttacgtaaagcttttctatatcttcactacctttccctgggtcccacgttcatttcagccttgtctttactctcaattggtttaacataccaaactgctcttgttggaaattataaattttatttgactgctttattgtaggacatatttgctttgcatgaggacttttaatacatcagaatagtgtagggttgtccttggcaaaatcccaaaccttttttcagagcaaaaaacaaacccgggagagagaacaaattgtctttaatctttccatccatagcctttgtgacctctgttattgcaactcctgtagacctgcagtgttttttttgtgttgttattgtctttttttttaaatctcagtgatcttattttattttcttctaaattaaaaaaaaataacattggtgttatggctcgaattttgtcctttgtcacaagttggaagagttggttatgctggtgttacaggtactcacgggggaatgtgctggagctgttgtgtgaccatctgttgtatatatatatatatatatatatatatatatatatatgtgtatatatatatatatgtatatgtatatatatatatttaaactaaaataaaggctttagatggctcctggtgaaatatataataacatgttaaaaattcttaatttattacttttgatgtatggttctatcagcacagcagatttcagagatctgctttgttgattttttccaaattaactttttccttccttttatatctcctaaggcagatcacacaaatggatattttgggttgttaatgcactcttttcttactcaaaagtcctagggaccttaagtaatttactttgccttctgtgccagctttcatctagtttatgtcttcatattttctttccatctagagactagacgcctgtttgacttaatagttgaatttatgactttttacttgacttctgttgaagcaactgtttagctacatgaagagatttttttttgtgtattttttatagtttggctcattgcctaaaatattatgcaatagtgagtaggtgctttgcattccaggcataatttagtttatctaaaagtttgtcatgtaattcatggaggaatcatttatttaaaagtaaagtttggccgggtgtggtggctcatgtctgtaatcctagcattttcggatgctgaggcaggcagatcgcctgaggtcgggagttcgagaccgcctggccaacatggtgaaaccccatctctactaaaaaaaaatacaaaaattacccgggtgtggtggcaggcacctgtaatcccagctactcaggaggctgaggcaggagaattgcctgaaccctggaggcgggcgttgcagagagccaagattgtgccactgcactccagcctgggtgacaagagtgaaactctgtctcaaaaaaaaaaaaaaaaaaaaaaaaaaaccgtgaagattgacttttatagagaaggctgaattattttgcagaaactaaataaaatttgaataaaatacttcaatttctcacttcctaatagctatattagttttatgttgttatctggaaaggtgcatatctttaaagtataaacttgttttatataaaactacttaagataaaatatcaatgttatagagctaaatgctgatgggggccttgaatggttggtaaacgttggatagatgtggcatcaaggtgcatttcacaggtaaattgaagcctttgtggtttgaagaggtgaatgtacatcacaggcattcaacatgtgtaagcagagacccccagttctaaactggttattaaccctgggaatagcacattggaggctgccaggtgatccaaacactagcatcaaacacttaattttaactgttgtaagagagacaatagatagtataaacaagcagagagaatataggacaaacttggaagggcagtgcttgacttttctagttgtgaataaattctgaaccttttcttccacactttatctgcatttgtcatatagggggcatcactttctaatgtacagttttttaaatattttaccttttgtggtgatatgtttattgaggacaggcatttattgttccttttttatagtccccttgataacccaattaattaattttccaagtgtcatgcacagtgtgataggggttctaggtgtagctagatgtgggactaaaaaatatttaacgaagaaattaaaatttacctatttttgactgggcacggtggctcccatgtctgtaatcccagcactttaggaggccaaggcaggtggatcacccaaggtcaggagttcgacaccagcctggccaatatggtgaaaccctgtctctactaaaaatacaaaaaattagctgggtgtggtggcaggtgcctgtaatcccagctacttgggaggctgaggcaggagaatcgcttgaaccctggaggtggaggttgcagtgagccgagatcatgccattgcactccagcctgggcaacaagagcaaaactccatctcaaataaataaataaataaataaataaataaataaataaataaataaaatatacctacttttttcccagatagccttccattttccactctgttttcacttcatgttcctcatcctttctagccattcctgtctttctctgatgtccctccactctctagatctattttgagccattaaaatgtgggtagtctgaattgagatctgtaataaatgctaagttacatcacgggtatgataagaacaaaagagtgttactatctcattagtttttatattatttacatattgaagataatattttggctatattggattacataagtattaaaataaacaacatgtgatttttcctttctaaaatacagtttactagcaaatttaaaattatgtatgtagatttaattatatttttattggagaatgctgctctagagtcttttattgatttttttctactaactctcttaagacacctttttgcctaatctcttctgctcaaaaaatattttcatgggggcctgaaattagaagactgacaaatctagccaagcacagtggcccacacctatagccttggctacttgggaggctgaggcaggagcattgcttgagcgcaggagttggagtatagcctgggcaacatcgcaagaccctgtctcttaaaaaacaaaagaaaaaaataccaacaaatcttctgaaacttgtctttaaaaatgttagatgtaatatgaaaatgttagatgtaatattattcatcaatgatgcactgataaatgcaatcacaaacattatgctaaaataaacaagtcaaaatagaccttgttctatataattccagttatgtatgaaatgtgtagaacaggtaaatctgcagagatgggaagtggttgcctaggaaagcagggaggaggaagtgaggaatgactgctagtaggcactaggtttcttttaggagagagaaaggtaaaatcagagagtggtgattgttgcacaactctgactacgttaaaagcctctgaattgtacgttttaaaagggtgaattttgtggtatgtgaattatatcttaacagcagttaaaacaaatttaccttatcctttattaaaatcaactttgctagaatttaagtgtgtgtttttgttaacgtcaattgtggccaggtgctttcatcttaaaaaatgaaaaaaaaacaggtcaatgtgtgctggaacttttgtaagcagttaattcctttttaaaattggtgtgtgtgcaaaatttattttaatgcagtttttcccccaaggggacttgttaggcaaatgtatttaagtgtccttttaatgcattttatagcttcagtttattcctttataccacagtgatgttccaacatctgatgaattctggcttttcattaggacatctggatttcacacacacacacacacacacacacacggaataacaaaagataaaacatttttcacaaggtggttatacatatctatactacaaatgtataaatatgttttttcctaacaaatcttgacaatacagaggttgatgtgctgaagagaaacacttcgattaaattggtccattataagaaatgaaaaaagatgaatgtaaaggagtattttaaaaaataatttctttccagcttcatttttttcttttactattcttccttaaagatgactgtaaactggaatatcttaggttaatattatttttatatttacacctctaagtgttcattattttatatctgtccttcattttgacatggctaattttaaccttcaaaataaatatataaataaaccaatgtaaaactaatatcaactttgatcagcttgaccttaactaagcaaatagtggagaaatgaaagtttcttacagaagtttaatgtcttaaaatggggagaagcattttgctttcatctgctccatcagctacactgggacagcagttgtgtctccattaaattaggtgtgctttgattctccaaaataaagaattttctagacacttgacttgtgtcagtgacttaatagagaaggaacacccccaaattggcaactctgtttatctttaatgattacttcttttggaaggaaaagggcattctttcttttttttttaaagacaggtctcactttgttgcctaggctggagtacagtggtatgattacagctgctcactgcagcctcaacctcctgggctcaagtgatcctcccacctcagcctcttgaatagctgggacttcaggcatgcatcaccatgccctgctaattttttatttttagtagagacgagatctcactgtgttgctaggctggtctccacttcctgagctcaagcaatcctcccaccttgaccttccaaagtgctgggattacaggtgtgagtccccatgcccagctggaaaagggcattcttgatgattttcaaaccacagctgggacatacaatgaatctataatcaataatgtattattactctccactgttgacatggttttgatcggtgtccccacccaaatctcatgttcaaatgtaatccccagtgctggaggtggggcctggtgggcagtgattggatcatgggggagttttctcatgaatggtttagcaccatccccctagtgctgttctcctggtagagttctcatgagatctgattgttaaaattgtgtggtacctccccacttctttctcttggtcctgctcctgccatgtgagatgctgtgctccccctttgccttctgcatgattgaaaactccctgagccctctccagaagcagatactaccatgctgcctgtacaacttgtgggatcctgagccaattaaacctcttttctttataaattacccagtttcaggtatttctttatagcaatgcaagaacagactaatacaacctctttgaatcttttcccattaattatggacaactgttatctccagtgtaatgttattattctgatagataagtaccatgattgtcttgtttattagaaatggcagcccatgaaggtttcttacttggaggaacttaaagaatgatagcaacagactatgagcattttcttgcagtctatagagtacagggccagacttctggcctgtgctgtttcactggttcaaatgactccatttgtatttgctgtggatgtctgtgttttagtagcagctttgggtataaagctgtcaaagccatcacttcagaattcataggtgatccacagagatccaggtggtgggagaatggctttcaaggtgaaacttggtgaggtggaacaaggtttccaggtggttgtgggtttcttgcctgtcttccttttttcttttgtcccattgtaagtagtgggcataaaagctatgggctataatgaactttgccaagttttgatgccatgccctgaccattatagaagcccggtaaattaatttagtgtgatcgtataactataagaagatgtttttgatttattggatattaaaacttgaaggaacatagggataatgaaatttatcctactcattttccaaatgaggagcctgccaaagattcccaacacatttaccattaatctttttcttcctttgcaatagattcctgatacttttaacctgtactgctcatatttaaacattccaattttcaagccatgaggatggctttttaagtgtatatataattttaatgtcaatgcatgtatttccaaaattctgtgagctttaataatagaaggaatatttgaatgaccatgagaaatgtccgtcgtttgtgtgtgtgccttttcattggtgacagagatgagtgtaaggagaagagcataatggatttctttcacatatgtaagcaaacaaatacactgaaaaatgctctgtgattctctcaaatggtatggtttcttttttattcctctagttttattgaattttaattgaccaatacaaattgcatatagtcaagatgtacaacatcatgacttaattcatatatacattgtgtagtgatttctacaatcaaattaatacaccgttcaccacacagttgccattttgtgtgtgtgtgcaagtgtgtgcgtgtgcacatgcgcacataaaaaggacacttaaaatctgcttcaaatggcatggtttcttattataagcaattaaatgtagacatttatttcaagtcatattatacaaatgtgtagtttatactcttcttagagtatattttaaattttttagtgtagagttatcttccatatattctgtatttatgactgcatactcatatctgtaaggagagtgtcatctttttattaacttattttataataaagtgaataaaacagctggcttaatcttaagaataagcaatccctgtcagatgattgactcttcatctgctctctgtatactggccctgtttcctttttttgcccaaaacatttacatatttcctgatttttagtttggatggaggtggggagatcaattttcttattgctattcatcttgacagtttgtgccactaaagtaagagatggagagaaattttctgaatgttcaagtccctatggagaccatagtgttgacccagtagagacagttgagaatacaaattgggagactgattttcttgccttctctactatttgtatatttgacagtataaggtgtttgagggcagtacatgtggaaatgttaaggagttaacattaatagtactgtggttaaacagatggcgtaattagcccgcaatggggaagaacaatgttttcgtgtttggataaaaagggcacactgtaggtggtagaataagaggttccaaatgacagtaccttatgaagatcaggcaagtgacaattttcatgatttaggcacatatctgtgcatatgtgcacctatatataatctctagacctatttttatctaagtaaacaaactcttgtcatttttaggaaaaaattatctgtatgtgaatgcataaatgactattaattcagcttagtctgggagatgtggctaagtattgtggaggatgcagaaaagaatttggtctttgtattcaagtagtcagttttctgggacaaattcataagcacaatggcaaatataggacctggcaaaaatttattgcaagtgattagctatatgattacttagccaagtccagtattcttcacaaggggaatatttttagtaagacagagaaagcagttgatggactaagtctgtctgtctcttcaacttactcaatattgttacctacttctctgtgtggaatgaggtttgcttttgtcaaatctgatttattctgaacttggttatagatgcagcacaaaaagtgatgcaacaagcaagaaaacataatcaagtgaataaaagaatatggtaaaccttcctgtttgtatactttgaaagtattttccatagtaaacttggaagttgaaattggttgtattctgtgctatttagatagatatgactcagatttttataataatgtaaattttgaatattacctcatattttggctaattattagagagatatttgcagattttcccccttgtcagcccatctgctcctatggtacagtcataatgcggaaacattgacatctcaattatttccatggcaacaaattgatgtcaggatcctacatttaacttcactgcaggaccaaataggatttggattacaggggtgggttgggagctgttattgaaacataagtctttaagaaagggaaatagaaacattttgggaaatgtatttttcaaatttagacttacctttaaagaggaaattataaaaccacacatgaagtgaataaatgaatgctcttctctctttctatctgtaaaaagccaatgaaggacattttctttctctgtgatggttgcaagtaaaactttgaatctcatctaatgtttgcttaaaaaccggaaagacccaggcagttgtccatagtccaagttcagaactatcatacttttagtttagtaatgtatataaataaagtatatggtacttcaaccttaaattatgtaatctctgtgtcttttgtttagaatatggtaattatagttatcttatcttccatacttgagggactgcataacttcagtgtgttttggtactttgccttcctttttttatgtcatttttgtgctgcattaaagagtatctagtattttattagatactcctgatatggttttactcattttttttactcagggtaaacaattacatttgattcctacttacaaattttgttgaatctacaaatatttctgatacttttttgttctgtaacccttggtttgtaacttgtcataaggctggcctcatattcaagtgcatttgggcttctgcctccctggctggaatgtgaaggcaggaattgtgtctttgttatactcatagtacctggcacatagtgggtaatttaagtctgtttgttgaaaaatcttgttatgatctcataacaagagtttgtcagggcagattttcagagtatcgatgatgtcaccccattccactgctggatcttgaattttgcagggttaacattttgatttatctgttttgaggagcccgattcatgataaaacaagctgaaaagagactgacttatcatgaataattggtgataattccctggttctgtctattaacttcttttgatgactgatttcacgctgggagatcacattgtagattatatggctcttagatgaaccagccctggattaggtgttcctaaattaggtgttcaaaagtattgtgtttgctgtataaattgtgtctggacattttttctatccaggtacctgatagccatctctaggaggaaagtattttctaactcttaactgtgctggacaaataccaccagaaattgtgttcttctctcctctaaaatgactgtatatcttcaccctcccattaaatattacataagacattagagtgtgaatattacaaatgtatgacctttggtatccctattaaaacaagagggaaggagaggtagagaaatgggcactaacttgcttcaaatcgcactctgaaataagtggaggagttgggatttgaatctgattctggagtcaggtcacttgcttctgagctcatatatagattgatagatcatttctgaagtaggatatgctgcttatgctttaattttaactgttttcagtattaaaaggggagcgtctttccaaatttgagcatatctcactgtagcccctaagtgggaatgatagttttctacctgcaatatacctgctttcaaggtcaggaaagcagagaattgacatgagactaagaagaaaatgagtgtatttaatgataagaatttataatgagatttcaaatcagcaaatatacccattttggatctatttatttattttttctgtgcaacttaatagcattgcagtaaaaacttgctaatttagatgacttgtgggcaacacctgtttgaattaactgaaagtctgaatcacataataattttgtatacaataagttttattatttttctgatacataattaacatcatttaggagctagaaaaactaagcttctgagttacttagaatagtttgttttatatgctattaattgccttttaaaatatttaatattttctacttagagattgactctttgcaaaaggcttttatatacagccctacatttaatccccagaggaatccttatttttcagattagtcaatttggagtaaaaggagagcattaaaaaaatttcttcaggaccagatgtctggttatataattctatatcaagttaatatagctttcaaaaagtaaagcaaaatagctgagtaaacttatcatgagcagacccacattacaagaaatattcaaggatttccttcagacagaaggtaaatgataccaggtggaagtatggatctacacaaaagaacagtgctgagatgcctatattagtaaatataacattttttattaggtatatctctttaaaggataattagtgactcctgacaggtatggggtttctttttggggtgatgaaaatgttttggagttagacaataatgatggttgtaaatccactaaaatccactgcgttgtacacttgaaaatgatgaattttatggcatgtaaatcatattgcaatacaaataaataacaaatatttttaaataaggtattgataaagcaaaaagatggctggttagcattagcctggcctaaagcctgtgtatttgagatgtttcattattacatcacaaatctttgctatttagataactctttttaaattatcatcaaagtttgcttagcagcatctgaactgtcttggtctgctcaggctgctataacagaataccagaggctgggtagctgatcaacaaaagaaatttatttctcacagttctggaggctgggagatccaaggtcaaggtgccagtagatttggtgtctggcgagggccctttttgtggttcatagaagctgtcttctggctatgtcctcacttggctgaaggggcaagggacggaggtctcttaaaactaaaggttttgcccttcgctgaagaccgttgctgttgctttattccattaagggctgcaaaatggggattttcttattatatatccatatgttattgtgtattgtgtcttattctttcttatccatagagtgtctggaattaacttctatagaagaactttgctttacctgccagggctatttggttacctggaaccacagtttttaatggcaaggtggaagaattttcttccttatgtatcagttttcagcatactaagttggtgccctgcatgcatcatagttttcagtttctccatgtgattcttacatgcagcttgggtagagtagcaccaatgtagagcttggatacatcccaaattccaaagttttattacttattataaaagcacatttacagggtggctattttgtttttgccacattatttatcctcttgccaaactttatcagagcatatggatttctttcgaagcatttctataggggagttttgggaggtgcttccttatatttgttcatcttacaaactaaggtaaatgaattgtagaagaaacactccaaaggcaaccaaaaaataatgttaacatttgttcaggatttattttgtgccaggctttgagcttggccctttacaatcgttagcttatttaccctcataacacctcatgaggtaggtaatctaattcctaatgcaacagaagctaaaatttatctacttgtctaaagttatgggtccagcaaagggttgggctggagctaaggggtgcagacgttgggagatccagagcctatgcagtgagtcccaattctctgctcttctcagagtgggatatttcacatgtctaatcccattccccctgtagatttgtctatttccattctgagacaaagaaatggaatgactgtttgtaatattcagattctgccatgggaaaatggaaatatatacagttgtctacagtagtggtattttgattagaccaatatagctagcattttcaaagtggttataaggtgatggtcacaatgttatttacataccttcatgatagcatttaatcgctaaatctgcaggtcagctgttattaactctgaggaaataggcttaaggaaatttagtactcaatgtgacacagtgaagttggaaccaaagttcctctgactatgtagatctttattcttaatcacattatgctgactgggcagaggaagagttaataggaattaagagaggttggagagtagccatctccggaagccaatttaaggttgttttccatccaaaacaggaaacctatatagcaataacaacacaagttttatagaatatggcccaattaattacctcaatatgaaaatatggtcatatctctatagtgtgcttgttttcatttttcagttcctccctggtgttggacagtgaaagaataaggtattgactaatcatgatcagttcagaattttgctgtgatttttcaataggtgtttctcattatttggaaatgagcactcagtaaaagaccttgctgtgtcttgcatggtttgcctcattatgcttgtgggatgtgaatttaagaaaagtaagcttggattattttccccagcgattgaagcttaggttgtataggtatataattttaccatatcaaaatatttgataattaaaaccttataaagagaatgtaatgcatccctaaaagcccatttggaagggaagacacagtcaacaaccagcaacttattaactggggaaaaagtaccaaatgcacttgtgtatattttaagtgaaaagaagagaggactcggatgaccatgcttagttaagggggagggtgaccttttatatgcaagttgggaaatacagagaaagtgaaaggggaccaaaatgaaaacacatgaaataagataagcagagatgaaaggtggcactagaactgtaagaagcatttgaacaggcagaacagtgctggagactttaggagagggctcaagctgccatgtggccggtcctcaaatagttctagaatgactagcatatctttttacaaaactataagcaacttgagggcaaaaataaagtatatttatcttgcatcctgaagaataaacatggtgcttggcatttggtaggttttctttatgtgtatatatgaaaagcatattttcattttattagaagattgtggtaaaaattctattgaaaaccatgctataatgtagatagctagacttagttcggtggtttccaaactttttggttcaagtacccatttatgctcctaaaattgttactgacagtctaaaataacttaggtttatgtggattatgtctatcaatatttaccatataagaaattaaaactgagagattagaaaaccaataattaaaaacccattacatgttagcataaaacgtatttttgcaggaaataaaacccctacatttccaaaataaacaacaaacaaaaaaaatttaccgaggctttttttttaacatattttgcaaatcttcagtttctagcttattagaagactaaatttttgtacctcttctgcattcaatctcatattttgttttgtttgaatgtattaaaaaaactcaccccacacaaatatgtggttggaaaaaggaggtgtgttttatagacttttcaaataattgtgtatatccttcttttatactatgccaaaagtctacagattataatttcttaagagtttgaatcagaatctaaaactttatcagtgagcaatttatactctgttttgttaaaatagattggtgttttttgtagtttgggtggatcttttacctatgcatgatttggaaacatcatgtattggtcaattggaaaatatcaagttgctaagttatttagatgttccccacgttggcatatttcattatgtatcaaacaatcagatttttaatatcaaagtattttaagagttggaaagctgtcaagctcaggatggtggattaaattttttagtataccgtttttggcttaagagctcaaattttgtcattggcaacagacattgtcacttatttttcttgaggtgacaggcttactccttttctcattttaaacgttggtcatgaccacttgggaagagtttgtcttcagtgaatcagtcaagtaaaaatggcgtttcatgaaaagagtggctagttcagctcatatctcagtctcataagtgctttccttgagataaacaacccatcttattttgatatgcaacagaaatgctttatgtatactttccttcatcatacagaatattaaaatgacataacgattgtgattttaacaattaattttacatgtttatcaaagatattgtcaagtgaaactgcgttctatttactatgattgcatgtcagtgaaaagtaaaatgactgccagtaaaatttgttgcccctgccttagttcttgctaaaggaatcaacagttttaccaaccaagagtttcattgcaccatcagtggaaaaggtaagtagtgccttaatatgacgtggaaatggttttgacctcaaagaccccaggagggccctgagaaacactcactttgagtatccgtggtttggggcaggggaggttatagtgtacgataaagcaattatacttatatgtgaaaattattttggtatatatttctaagagtagaatttcttccatgcattagaacaagtggttttgtttaattggttcattaacagcttggataaattaaattgctattacagagaagaagataatttgtttttaattttcaaataaattgagtacaataatgcttcacagtgaatttcttaatagtgatcttgctcattgtcataactgtgtgcacatccttagacacaaatatggtttaagcaggtggcatacttttctccactgtcaaagtattaatatcatttctctgcttatatggttctttttcttttcttttccttctttttttttttttgttgagatgcgtcttgctttgtcacccaggctggagtgaaatggcgtgatctcagcttgctgcaacctccgcccccgcccccaacctgggttcaagtgattctggtgtctcagcctccctaatagctgaaataacaggcgtgtgccattatgcctggcaattttttttttttttttttgcatttttagtaaagacggggcttcaccacgttggccaggctggtctcaaactcctggcctcaaataattcttctgcctcgccctcccaaagtgctggaattacaggcatgagccaccgcacccagccagcttatagagttctttgtctgatttttgtactactatagttttatctcacaaagtaagcatatgggcaaaaacagcgtaagtgtgaatgtgttagacttttcagttactgagttaacatagcacctaattcacatgcaaatattatatatttattcctacccttggttaatagtcaatttaaaaaattgcaccttgggaaaaaaaaatcattgtttttacctagagagcagagatgagattattttattagaatttcttctaggattttctactgttgtattttccccttcatttttttatccaggtttccgttttggagaaaaaagcaacattgaagaatgaggtagagccctggaaaaaagtgtccttctaggtgtgttaagaatggttatagagattgatatcagataccatgagtgagcaaaatagtaaattctcataaaataatacatgagtataggtattgagctcttttaaataatatcaagtgatatagatgaaggaagaaaatgttaaaagggttttaaataagtctctttttcaatggtgtaagtatgagatttgtgaagccctttccagatgcatgtgtgtttgcttatgtttaaaaaatcacttgagtgcaaacatttaaacacattttataaaactggcgggccaggcacggtggctcatgcctgtaatcccagcactttgggaggccgaggcgggtggatcacgaggtcaggagtttgagaccagcctgaccaacatggtgaaaccccgtctctactgggggaaaaaaaaaattagccaggcgtggtggtgggtgcctgtagtcccagctactcaggaggctgaggcaggagaatcacttgaacccaggaggcggaggttgcaatgagccgagatcatgccattgtgctccggcctgggtgacaaagcgagactctttctcaaaaaaacaaaaacaaaaacaaacagacaaacaaacaaaactggcatggcattggacagtgacacataagaagctgatgtcatctttgccacttagagaaggcaaaatatcttgttagataacccctcttaaatgctctgcttggctagtactttttgggcttggtcagtgattagagtttaagttgtaaatggtattcataatttcttgtctctgtctcatcccaaacagattagaaaatctttgatttttgttggtaaggagctagcatcttattaatacaaagccttgtgcataaattatttccagtaattatttagtgcctaatgtggcatgctttgtgctgagtgctgaggataaaagaggaataaggtaagatctttatagtttagcagaggaggatgtgagtgggcagaaaaatgttatgagttctataataggaatatgtataggggaacttggttacagctcagcttaattgagaaagggtgtgaaatgaaaagaccaaacattctttgcagaacagctaaacagttggaattatatactcagatgagttaatgattataaatagccatcatttattatctctccagaactccagaaccaaggttataaaaaatgaatagttctttatttagttcagaagcatttgtgaagtatctatagcatctgtaacatggcaggccctaaggacgctggcatgaatagtgggccgtcatctactgggagagtcagtatagcgtgtacatgcgttagaggtgaaatgcataaaggggcatccaacatggctggtggctggccatgtgaacaagacatttgcatttgccacagcataaagaaggatatttctgagtcatggagtattttattatgtttatttggccccaatatttccaaataaaaagaggcctttgcttttgtgctacaggcgtttcttatctttaggaagaatgggccgggcgcggtggctcacacctgtaatcccagcactttgggaggtcaaggcaggcggatcacaaggtcaggagttcgagacaagcctgaccaatatggtgaaaccccatctctactaaaaatacaaaaattagctgggcttggtggcacacgcgtgtagtcccagctactcaggaggcgaggcaggagaattgcttgaacctggtaggtggaggttacagtgagccaagatcgtgccattgcactccagcctgggtgacagagtgagactccatctaaaaaaaaaaaaaaaggcacggttttgaatctgcacactcaaaaatggccacagctttcccgctactttaagcactcataatagattaagcatgggtcagatctcaccactcattagctattgggtctgaccactaattatttagtggatctctagatcagttatgtaacatctctaaatcttactttcttctactgtaaattagagataaaaaaagtagccaactcctagtggttttgtgagcatttaatgaaatgatctatgtaaagtgctcagcatggtgcctgacatatggtggagacttgttatatgttagctattattattttctcttaaagtactttaataaactgcatataatttaatcctcagaataactccaaaattaggatttctcttatttcacaggtcaggtagaaatcttggcattctggcagggcttttcactaccaaccaagataacagcttgcttattcaaaccaggagctgcttttagtgttggtaatgatttcatagagagtgatgctatctttttttcattaaagtgggatgataaacattttcgtaccccctcaccatgtgcaaagcactgtgctaagtattttagaaataggaaacttgaaactgggatcatccttgtccttaagaagcttacactttattatgataaataagataaaaatttaagtaactatgcagtagaatatactgtatagttttgaaaagaaaaagtattacttgactttgtcttatttaagctttagatattctgaggggtaaaaaacacaagattgcagttgttagaaaagctgttttgagcatttttcccctactgttttccttagttttatttgcaagctggagcaggtattaaagatgaagtgttctggtgggagcggtagcccagagtgcttgaagcattgctaatttcaaaccttataatttagttaaattgaaacataactgcatttagatgaatgggctgctagttttccttcccaaagcaaacatgccaacctctcattacttcttgtctgtgctacggcttctgtgctattcagatctgctcgtttacacataattgacatgtaacagtgtcacagactttttattttgcagaaagaatttttaaaaaattaggaatgctttccatagcatgccgtatcaattattctacattttgaagtgagaatgacagagtgatccagaaacttggtgtttctgtggaaagcggtttgtacagtacttggctcatgcttttacagacctgggagtaagtgacacagtaggtctgattacaaatacagtttatcttcatttggaatccatgacttctattaaatttaattacttcccccgtggcttctattaaatttaattaattccccctgcagctggcatggtagaggtgctgctgctaaatgaaggtgattgctaattgagggagttttctgaaagaggttttaccctttctcttgtttatctggaaatcgcttatccagccagacatctgagaacattagtgagaagtgcaggttgcaaagtcataggtgagttcatcaccgttacttagagaatggtagattttttttttttctttttctcttggatctgattctgcagttaacatgccttttggtgagaggccagtgtaggattctaattgaagaaaactggcccagtcttaacctatacaagatggaacatgttaggtctatatacttggaattttctagcaaccctgtcgaggttaattgttgctcagtttcaaaaacaaaagaaaacaggtgaaagaattcagcatcaggagcagtttgttacccatccaatagccattatttggtggactccaccaatgacagtaagcagtcttattgttaatatggtttacctggtcatacagctataatgataatgtaaatatcactatacattcctaaggcaaaacaagaaaactcaaaacatttaaaaaaatcaaatatataattgccattgctttgcttctaaaagttggtcaaatattaggaagaaaaatgtatactgtaattagaactacatgcatttaatgcatttttattctcatcctttcatgtatatatgtaagtatatatatatacatatactttatatgtaagcatatatatactttatataaattacccagtctcagggaagttctttagagcagtgtgaaaagggactaatacaatagatgatgcctaaagctgaaaagtcacgaagcagctatataagcatattatacaaatatactttatatgtaagtgtatttatactttcatatatataaaagaaaggatgagaataaatgctattttatagtatttatataatatactattatatatagtatttatactattatatataaattatatatagtatttatactattatatataaattatatatatatatatatataaataaaatagtagagttgggggtcttgctattttgctcagctggtctccaactcctgggctcaagctttcctcccaccaaagtgctgggattacaggcatgagctaccgcacctggcccttttattctataatagaaaggagctctcatttttttgagcatcagtgtgtgccagaaattatatatatactctacacacatactttatatgtaagtatatttatggtattgtatataaatgtggaatatatgtacattaattttcctagcagtccaatgaactattttatacatgaagtgttgagactcaaattcttatcttttctctcaataatttcacctgctcatataaatggtgtgtgaaaatcctggctttgaaggaagatctgttgttctttgaatggacaataaatactcttttggcaacaagctccttaggaagctacttcccttttcttcataatttcatttctgttttttcttctacttttctggacattctgcttggctcaacctcggaagtcattatttcttacttaccatctataaactcattcattactctaaatttgttactccagtcctgacctctctttgagcctgttaaagaaaaccagagctgcacagtagttaaagcgataaaaaacagattttattcaggaactattgcaatagagggaaagagggctcagcatataactgggcttacttctgaatacagcatggacaagtggggatttatagccacagaagcagggttgggagtcagtgaatggaaaattactaagaggaaatctcagaggaaaaaggggattctggttaaacagacctaacagaattcttgctaaaggcaagccagggtggtgagatacatcacctggggatgggaatcgggggaatgaggaatttgatcagatgtataataggttggagggttctcactaaactgataagcaggattttgctaacattgggctattcacgtctggcattcttggggcctagttgagaaatgggcttagaagagcctgaataaattctggtctaggaaggctgggagtgctggctcacacctgtaatcctagcactttgggaagccgaggcaggtggatcacaaggtcaggagttcaagaccagcctggccaacatggtgaaaccctgtctctacaaaaagtacaaaaattagccaggtgtggtggcacgtgcctgtagtcccagctactcgtgagtctgaggcaggagaattgcttgaacctgggaggtggaggttgcagtgagccaagagcgtgccagtgcactccagcttgggcaacagtgtgagactccatctcaaaaacaaaagaaaaaaaaatctggtctaggagagtgtctctgtcaagccccggaaactttcactctttccatatctctatttgcttatttcccaggcatagcaaactgaaatcattacattcctgtacaaatatgtattttcttcctccaaccttccctgctggctttgactcagttagtgattaatatcagaaacctgggagtcataattccttctctgtctctgcctcaccttcaagtattaagctgtatttagtttaataacagatctttctactttattgcatttcaccccaacctcaccgttttagtctctgccacttggatgactatacttgctccctaatctagtgttccctcaaatccaggctccagacaacttgtacctttggattataatatgataattttacttttcttttcccactttgttcctcctcctctttcccctttcctctcttctttcctcctctatttttctagtctccgcatcccttattccctcctacttttcttcttctcaattcacttcctcacccctcttccctcatctccttcttacgtctccctcctccaggtacctggcagatagaatcataaagacttgtgtgtttcagtaatctgtgatgtggtgcttattactgatttagactgagcatatttaaagacggtgtactgataaccatgtgaaattccaagaaaattctgtttttcagaatgacctcagtgttcctgtctgctaccattttaaataattaatcttattgtttttggttttttttttgtgaagtgtactatgttatcatgttattttaacttgatttgtcagctttattttaagatggtaaccaattactaaagttctgaactttacagttctgatgaaagtacacatatgtttgcgcttcaccaatgctatacaaattcaaattccttttacaataaatcttagtttttcttctcaattagtcattaagtttcctgattattctttaactgatactgtattaatgtactggctatgttaattagagccatgaagatgcaggggtccatcggtgaatgaattagactttttcccttaaccctttatatgcctctatcctcagttgttctgctcaggatatagtagaggctgcatagtacagattgtactaccatttttgcacaagtttagtttgaagatacttttcgttatgtatgaagatgcacttttattctttggaagctcaccactgtgtgggagaaatgagataggtgtttggtagagtacaagtatacagggccagaaataattaggtatattttatgggcactggtggccagtttcctatataggagggcttatgggtggccatatagttgtaggtgggagggccatggacttgttttgaagctgcatttgataacatgcaaatgtttacctatttgaaaaatagtttacttgaggtgggtatggggtctaggaggaggttagatgttggacttagatccctagtcaatgctgatcccaccaccattgaaggaaaagaaggtggacagagataaaatgatgaaagagggagctgcaaaaggaggtaggcaatgaattgaaaaatgaggtgactgtggccccaaggctagaagaatttaacctgacagcgtgcagggaattcagggaggaaagtctacctgctttactccattccagaactatcttttgcatatttaaactttaaacaaatgtacaactctattcagaattttgtaaagaacattatgaagtattttgaagacatgtctagcagtattcatctttacttgtcttttctgatatttattcaaatatggagttaacacttgagatctgacttttgatgactcctagatcggtctgagtttggaagtcagagatctctggagatttagttttgattgttatttacatgttgggcttatagctactgagtgttggtgtccactgtggtctcttctgaaccatttttctaggctttcttttctgatggcttctctttagaatgatagtacagaccatttgtgctttcataatcttttgttattactgcaatagtgaccaaaaccagctgtctagctctctttcatgtgtaaaccattctgtatatatcgtcttaaattactaatcttttggttgactcttagaagtgaatccatcttgtgaatccttgtttgcggactgtgttatacttttgttagtttcatggaagatagatctgactcccaagcttatgtgtattagcttttttctacactatctagaggagagactagctggtcaagaatgaaaggccttaatgtaaggcctaggggagaggggacttgagggtgggccctggtccttgacatgaaaaccaatgctgtttgccaattgttttaattttctaatctttgttttttttttgattaataaaagagcacttcaaagacctttagacaaggctaaactatctctttgttgcttacttttgcccagtagaatgttctccccacaactgcctaaagtttccatttcacttcatgttttttcaaatagcaccgtttacagactaatttgggtgactgagtctccttagaaaacatggaatgcttttcagaggtttaagtggctacccaaaattcatagtgttggtaagatatgaaccatttacagaaaaggaaatataaacctttaagcagatttttaaaatgaggcttaataatccttataacaaagaaatgcaaattaaaatcataagaattgtcatttttttcacctctaagattgtcaaatattcagaaatttgatgtggctctatattagcatagattttggaaacagcaattcttatatgctgttgtttggtgtgtaagttggaacacacagtgtagggggtaatttagcagcatccatcaaatacagatggctgtatctaacaacaccttccctgggaatttattcaaaatgtctacgtacaagatattcaccgtggtattttttttttaatagcaaaagttgaaaagccactaaacgtccatcagcatggaactacttaaatcaattgtagtccatttatacagttgaatactctccagctgttaaaaaaattaaaataatgaggcagttctttctttatatactgatatggaaaggtcaaggcattttattaaagataaaaaataaaggtgtctgacagcacatatagtgtactaccttctattaaggagagaaatgacatatatttcttcttgattgtatatatacacacacgcatacagatatacatagaaattaaggatggattcacaagatactaatggcagcagttacttgcagaatgggaaaatttcactatattgcatttagtatgttaaaacaagtttttgaaacatacaaatatattttaaaaattagatttaaaaatcatactttagcatgagttaattgcattgtttcctttctaacactcatctgaaatcgggggaaagagttttgattgagaaagaaagaggatctaagcaattgcatagcattgaatccttagctgaggcaagctctcatccataacctaccatgaagacagtttggaacccttgagagataagaaattaagtagcaggagctttgcaagaaaatggaggtgaaaggatgccaaaggctaatttataccacagttgtctctgggtaaatatggggatttgttccagaacccccttgcccataccaaaatccatgtatactcaagtcctacagttggccccatgaaatccacatgtatgaacagttggccctctggatatgcaggttttgagtctcacaaatactgtattttctctctggtttggttgaaaaacaaatctacatatttggacctgtgcagttccagctctgttgttcaaggctcagtggtactttgaatattttctacaggcagctaactcaaagaaaaggaaaagatagggtgggatattcttctttcttgtctactcttctgcttctagtatgagtcagaatgtaaatcacaatcagaatgtgaatgtaaagtagtagcttggaattagcacatggttgaggtccattacagaccaaatatatttaattatttactctgggaaccattcagatgtttagaagtctatctatttgcaactgcattttcactttcagcagatgaattctcaaacttttggaagactaattaggggcagcatataattatcctcagggtcacagattgtcattcattgtaatcggtaggctttactccttggtgtttggactgtttttgtgatactttctctttaccccaaagcataggtttttgaattattaaaccatagcagaaatcatgaataaagcattttgaaggagattctattatctgaaacctactgtaattttttcatgcttgaattagttctatgtactaaggattattgtttcaaattacattagtgggaatagttttccatttttcttaatgaattattttattaaaaaatatattggccagactctgttcttgactgggtactcaatggtgaatcaaagtttctgcactcattgtattatttgtagtctttttggatacaggtgttatctaccgtgctcattcatagccccccaccccaccacttcagtaatttcattgtaaaatatgtgaagcaggaaggggaaggggaaatgcataactgttcaatcaattttgctcctaaatgtttgattcccatctaataaagaacttatgaccatttagtggaatcctgatcttctaagaaatttttccgtttttttaaaaacaattctttgatcactccaaagtactttctaagcaaatctcagtgtttccctggtattattccactgtttaatggaaagaacgttaagtttggagttctaattggaatactgatccatcactgaataattatatggtcattttttttttctctaaacttctgtttcaatgggaaagcaaaacttcttcccagagttgatgcaactattggaagtattttttgtgtaccaggagtactaggagctctctgtaaatgctgcccattatttggtgattaattcagaagcagctgatcagtaagagcttaagtagtggtactgtattcatcagtgtgttcaggtttcagtcttgcagcctgaactcctttgtctttaggcttttctcagcctaacttggcacctggggcagccctagttcactgtttgtatctttttgtaagttgatactccattgcatctgaggtgcacaacagctctttgattcaatccccaaatcaaaagaggtaagatgaaggcagatgaagagagctagaagtagttagttggacagaagtagagagatgaatgctgactggctcttctccatttcctgcctgtggcaagcagccagctgtttccttaattcaaaattctgtgtgccctggcagtgatagagtagattcttcttacagaattccctgctggcgattgccatttcaaagaagaaacttacagtagaattattatggtttagagtgttactgtgtgtataagagtaggtagaatgaagagccaagggttggcatccattcaaaagtggcacgcagaattttcatttattcctttactccttagcagaggtagagatgtcagtggaggtcacctacaggcaagactctctttgagaaacgtctgtgatgttaggtggtttgactgagcgaatcagccccaatgtatgcacagccgacccttgaacaacacgggcttgaactgcgtggggccgtttatatacccggatattttttcatccaaatggtgattgaaattacagtatcccgggatgggaaacccgtatatggggagaagcaacttttcggatgttcaggttcttcagggctgactgtgggactttagtatgcacggatttgggtataagctgggatcttgaaactgatctctcccgcctatgcgagggatgactgtgtcctgttaaccctgcccttctgggaatcgcgacagcttctggccgaaggtgggagctgtttcaattccacatattcacactcctcatagcccatttgctatgctatacctcggtacaccccctcatcagccctgcctatactgctattttgggtctgccttcattatttctctgcctgctactcatttagttttgtctcattctattctttctagcaagaacatctttattctacactctcctcctgccttgggtcagcttaattaccgcctaaataatcgctaaggctttggagtcgacctgtttgtttaaaaatgtatttaattatgtaatttatttttatttattgtggtaatgtcaccggaaaagggttcttgtcccagaccccaagagtgggttcttggatctctcatggaaaggaattcagggcgagtggcagagtatagtatagtgaaggtaacatagtttattagatactacttagttgcagagtagggtgtcctcagaatgcaagaggaggcacaccgccatttcaaatacaatgcttgcttatataaataggttttgatgtactcttttatgatggtttgtgattagcttgtggcaggctattaatattgttactttcttatattacgcttatctttaaagcaaaacctattctcaaactaagaatggtttttgttcttaaagtactagggcatttccataagttctgggtcttatacagttagttaacactattaacttagtccctcaaccatgaatatcttgtgaccaagagtgctgaaccccagggaaagtaacccagcagatttgactttttcccaccttcattcaagatggagtgactctggttaggatgcctctgatggtaggaatacttaaccatcataaattaaaaacacaagatttccctcttaaacaatttctaagtgcacaatacagtatcgctaactataggtgtaacgttgtacagcagatctctgggccttattcatcctgcgtaactgaggctttatatccattgaacagcaattcttgtttccccttctcttcataccctggcagccaccattctattttctgttcctatgagtttgactaatttagataactcaaagcaaaatcttatcagtcacagaaggacaaatactgcctaggttttaatccctttcctatccggtgatcttggcaagttacctggtactctgtgcctttgtttcctataaaatgggaggctaaaataaaaaatgcatgtgaagttctcagcatatcattttataaaaaaaaaaatcactcaacagtgattgttagcacttattatttagcgccactgcacctttttatttaagtcccataaataatctcaattgatgaaattagtgtcagtatatactgaaagcatggaaaagaaaagtcgttttagagaaagcagctttacaccaatttctaaagtaagcgacaatgtcaaaaattgtctttagaaactatatgtgtctctgaatattcctcctccgcaaaactttcaaatctgattttctttaagctccattaggtgaaatatattgtaaaagtttccttcagttggattattttacttgttagtatagttttaattgctattatggttaatttattattttccaatcttaatacaaatatttaaaactgtaatttaaaatgaaatttaaactatctaccagtcttttggggactatcttgagattttaaaacagtgctttggaaaaatgttggtcgagacccaaagagcaacaaattatctttttggattgaaaaaagggattgatttttttcatatcttttgttgctttacctgggactctcacaaagtgttaagaggtaaaattgttgctatatatatatatatatattttttttttcctctttctcattttggccagttgactgaataatttggtcaattagttgacttatttaattaaactacatcctgttataatgccaaaatgtttatttctagtatggtttatttgagaactcattttttattagaacacttttgatgactagaaagcacacaacaacttactttcattgtaatttttgagttggggcttttctgaaattttttgtctagcttcacccagggccaagctgttacagtcatgccttgctctcctgccctttattcatcatctctttgtgattcgtcccttaagagaagtctctaacagttctttgggttagcatttctctttcaagtaacagataacgaactgctttaagaccatacaccagaaagatagaaaactatcatttccttctcctttcatcagctgacccacattgttctgtgcgactcttggtctttgcccagcctcttcctcggtgctgtagtaaattcaaatttaaaccactggctagttatgttgagatgaattccatatcaagaaaaaagttttttttttaaattaaaaaagtaattccacattatttatgtcatcctcaaaagaccaactagtttaggggaagctgtttaattacacattcatttgacttacaattttagaccctgtcaggatgtccattgcaaactaagattttgaaaattataaagtttgaaattgttttaaaaaattgtagaacctatttgggagcatatccaacatagcattttcttgatttttgttataaagagagcacactggggaggctcacatgtgaggaatatctaagccagcctgcctgcctgcctgcctgcctgcctgcctgcctgcctgccttcctgcctgccttcctgccttccttccttccttccttccttccttccttccttccttccttccttccttccttccttcctgccttcctgccttcctgtcttacttccttcttgccttcctttctatgcctgcctgcctgcctgcctgcctgcctgcctgcctgcaaccttgacctcctaggctcaagtgatcctcctacctcagcctcctgagtggtggggactacacgtgtgtaccaccatgctcaacttttttttttcttatttttttgtagagacagattcttgctattttgccaaggctggtgttgaactcctggcctcaagtgatcctcccaccttggcctttcaaagtgctggcataagccactgtacccagctaaattcctttcctgaagtgaaatagctctatttattcaagtttattctggaatggaccagcataaaaaagattccagtactttaattttgatgcttagttttttttaactaattatatttattgagttctttgagtgccggacacactccacatttgtgctctcatttaacacttcagcagtaatatatgaggtgaattctatgactgagtaagtaaactgaaatttcaggagggtaagcagtttgttccaagtcatatggctatttagtgttgggatctgctctgccattgttcacagctatattcaattgccccgggtgttgtgtatctttccaaaaacgttgaaagggaggttcagaagtattcagttatttgtattattagtcgttttgaaactgagtagaaagactcatttaggaaagttccatatgccttcttgtctgtctatggctggtttgctcaggagaaaagtccacaattatacaattgtactcagagatcatgttatttgtatatctacctgcctcatcggagaggttgtgaatcgtcccagagacaagataatctttttgtttgcattcacctgggctattttggaggctagtttgtcatcttcctgcaggagtaattttatccatgtagttcctagactgttgtctaaatggaatcaagatgggtttgtcagccaccgttgcctaatggtgattttaggataaattatcttatctcgtattagcctaagaaatctctgacttgggatttggggtgatttaatacaaaatcattcaaagatttctttctgtcttttctttatggcttttggactgtgtacttatgactttctctgctgtgctcaagtatcttcttagtatctgtaagtaaaagttacttataaatgtctgtaaaaaaaaaaaaaaaacagtgttagaggctgggcatggtagctcacccctgtaatcccagcaccttgggaggccgaggcaggaggattgtttgagctcagggattcaagaccagcctgggcaacatggcgaaaccctgtctctatcaaaaatacaaaaaattaacctggtgtgatggtgtgcacctgtgatcccagctacttgggtggctgaggtgggagtatcacttgagcctgggaggcagaggttgcaatgagctgaaatctgagattgagccactgcagtatagccttggagacagagcaaaaccctgcctcaaaaacaaacaaacaaacaaacaaaatacaaaaaaaaaactattagaaatgccctggaataaaaagaatgaaatccggtcatttgcaacagcagggatggacgtggagttcactatggtaagtgaaatatgccaggcacagaaagacaatatcacatgttctcattcacatgtgggagtttcaaaagttgatctcatggaagtagagagtagaatgataattaccagaggctgggaagggtgtgtgtgggttgcggggtggaaagcggggatgaagaggggttggttgatggatacaaacatacagttagatagaaggaatacgttctcgtgtttgatagcacagtagggtgactatagttaacaatatgttgtatatttcaaaataggtagaagaattgaaatcttcgtagcacaaataaatgataaatatttgagtaaatatcctaaatactttgatttgatcaatacatattgtatacatgaatctaaatatcacatgtaccacataactatgtacaaaccttatgtattgatacaaatagttaaagggaattgaataataaagaataaaggataaaatatttaaactaatattaaaatcagggtaaaataaactatagctgcaaaatcataagacagttaagtgaatatacctggattaaggaaataaaatttaaaataatgaaaataccgaataaaaattaataataaaaatgtaaaaataaaattgaataaactacattgagttagggtgtgtgtgtgtgtgtgtgtgtgtgtgtttgtgaacacaacatacctgtatggtaggggtaacattggtttagattcactttgtacttcatacctgtgttcaaaagactcagctgagccctttgtgaggatattttgactttgaaaatctggaattgatgactcacttaaaatagttttatcttgggactgaaacagggacataggcatatttttgtatgattcacatcagagctgataatcttaatggtttgtaaagggcctaaatgattctacagttttatataaagcatgttaaactatcaaggctcattattacataactataaatggacagagttttataataagaaaaatgtacatttgtttagccattgtctcctaggaacttctctctattattacactattgcatttgcaaaggcaccaaaggtgcagtttggtttatatactgcagtagtaattcctaaaagatttaattgtatcaggttttttaacttaaaaatggaatcctatttaaagtatatccaaatattcgtacaataagaagttatcacagtctacctattttgtaaatgaggtgcagtgtttagttttcattggggtttttgattttctgttttgagcatttaaaacaaaatcctttgaaaatagtagttggtgatcacaatggtttatgacaattttaacaaattgtattagaagactctaaggagctgtattttcaaccgtgctttttctcttccttccttcctttctcttccctcactttttttcttcctcttccttccttccttccttcctttttgcattggggtaagaacataaataatattacatctttccactatgtctaaaaaagttggaggtggagaacagtatattttccatgaaaatgtcagcctgccacatagctctgcttagtaggcaaaccgttattcatttggattctctcttggctttacatttggaaacagttttagtgttaggtacttatgattgaaaaggagatctcatgttgagcttttattgcgttggatgcgcttaaaggaggttttgtaaaagaccattgcttcattaagaaaggaagaaagaaaaacaaacaattacatccagggaaatgctaggatttttgatagtttaacatgaccatgtcttgagcattttcagttcataatgaggcttgccctaactaaaatggcatttcatttcggttgatgtactcttgacattattggtgacatctgctaaattctaaaccatatttttttttaaattgatttcattcctacatcatcagctatgaccaccagttgagctggagagattggaatctggtgttttatttattaaaaaagacattttcagactgcttagctcacaaagatattttgtattctttttcaaaatatattttatttatcatggatgcttgtgttttaaggctgcatatttatttaaaatttatgaagaaccctggaaaacattcccaacacaatacaaagtccacacatttgcacaataattaagaatatttggccgagcacgatggctcatgcttgtaattccagcactttaggaagccgaggtgggcggatcacttgaggtctggagttagagaccagactggccaacatggtgaaacccgtctctactaaaaatacaaaaattagccgggcatggtggtgggtgcctgtaatcccagctactcggaaggctgaggcaggacaactgcctgaacttgagaggtagaggttgcagtgagccgagatcacaccattgcactccagcctgggtgacgcagcaagactccatctcaaaaaaaaaaaaaaaagaaaaaaattaaaaatcacacgttgactaataaagatttctttaaatgtttgtgtgtgggatgtgcttgttctttttggaagacactaggtatgttcacgtctccaggtttctccccgggggtgtgtggtgccagttcagaatctagcacacagtagacttcctaatccaaattttcctgaattaatgtctaatttttcctaatgtggcttgttttttgctatgaccaattcctgcttatatttcaacgtcaaaccttaaagtcacccttttgtgacttttcttgtttattattttttaaagcagaattaaatttttgtatgtgtgttttatacactctcatgcaagtgcataagctgcttcactagttatcatgtcctctctgtcttttctgctattattaaaggtaggtaatatattttagtctcattgcatcattagtacttagtatactctctgatatagaatgaacacttgataaattcttgttcaatcaagtaaagtcaaagacttcaaaagatgacttgggaggacaactagcatatatcgattttgtaaaatatgttaatatcttcattagttactttagaattcaatgcccatataatcttttaaataatcttgggagaaaggagacattatttctatttacagtcgaggaaactacggagttaaaagtacagaattaaactttctccctatctgtctcctgtcaaagctgtattaagctgcttcctgagagtttgaatttccatggttttagagccgtttctttcttaactcattgctaagtgacttggtggagtacaattttcaagactaagtttcttcccttaaattcctcatattgtataaacatactcattcaatactcatccatcaaggtgattctattattcccacagggaaccttttcatcatcacaattccatgtaaaatctcttacaaactactgaaattttcattctgatcttttataaataaaatttcatacctaataagtgaattcaaaaatgataaaatgcctatagtttaaaattaactttatattgcattgatgattatacaaatatatctcattatggttgatgttctctgtctatttgatcttttttgtaagtctctcaaggtagaaattatctaattaataatgcacacctcactgaattgagtaagtttacattctgagtcactaaggcaaacttctagaagagcctctaggattttcttttttaaacagaaatgcccctttaaaacatttctctgctctcatgtcttgccactggaatgcaatggaatgcattgtaaaaagatatatattttatagattagatgttggtgaagtttttagttgtcagattttactttgctataactttggaattggaactattacctttgttttattgcagtctaattagtaggacgggatgaggaagtatgaatctttatttttatcaaaaagccaagaaggtttttgtattggccattagctcagttgcttggaataatgtattagtcacctggaggtcataggcttatcacctggtggatgatagctttagtcctttctggagcacatctttgacatagcccctgtcagctctgtcaccagggaggcagggcaaggctataatggtggaagtacacattaattatctactttgaaaaagcaacttgaagtttagacttcgtgaccatagaattctaagaatttcgagttggaaggtaccttacggtcatgtgttcctgtccctccttttaaggatgatgaaattgacacacacataagctaagtgacttcccctagtttactagtagcatcacttggatttaaggccttacattttcttaacaaatgtgcagatacttcttgatttatgaagggattacatcccgataaacctatcataaatgaaaaaatattctaagtagaaatacttttaatacacctaacctaatgaaaattacaacctagcttattccaccttaaatatgttcagaacatttacattagcctacagttgggcaaagtcatctgacacaaggcctatttataataaagtgttgaatatctcatgcaatgtattgaatactgtattgaaagtgaaaaacaggatggctgtatgggtactctaaggacagttaatactgaatgtatatgacctttgcaccattgttaagtagaaaaattgcaagtcaatccatcataggttggggaccccatcggtactttagtcaggataggtcattgaaattcattctgagtattcatttgtttgtaggttagttaacttgttgatgtaatttgtacttgctgttagtttgtctggaatgactatttaccacagatcttcacattgacatatttcttccagtcatcctagttcctcctcagggaggtatcccctctagcactctgtatgacgttcctagatctaactgccattgcttgtggaacgtagactccatgaacatctcgttgtctttactgatctcagtatgcttagaacagtgtctacatttaatatatatttactgaacagttgaaagaatagataacgataggctttagaccttagtagtctactaatgatgtgcatctttagattgctataattgctttctcctaagctggagtacgatgcttagcgatggaagtcctactataattctgagcagctaattcttcagttgaagaatggactcggtcttatcgctgagtgagtaactccattgaattcttaggaagcagatttgtcatttcacagtgtccacagattctcatatgatttctcatttcactgtacatggaaaggatgatgccaaactttttttttcttttttttcgagacggagtctctctctgtcaccaggctggagtgcagtggcgtgatctcggctcactgcaatctccgcctcccgggttcaagtgattcccctgcctcagcctcccaagtagctgggaccacaggcacccaccaccatgcccggctaattttttgtgttttttagtagagacgaggttttaccctgttggccaggatgctctcgatctcctgacctcatgatctgcccgcctcagcctcccatagtgctgggattgcaggcgtgagccaccgcacctggcccaaacattttgttttatattgtcttgctagctgatggtcgtggttgatcctggctgtgtggaggctatgtggagggagggcttcaggagaagggactacttctggtgtggcagtcatccaggaattgaagacgatatctagctttactttggggaatacagaagtaatagattcattaaatgtatttaatgaatggattaattgaatcataaaaaagtaaaaatcatgttcatatgttacattgtctttctccaggaggacatacttcatttgtctgggaaggagcacagacattattgctttctgatattgtggcatatcttctgattgtcagcaatggcacaaagaagtgtgcttattgatagggttgataggagtggctcttcagccatgaatgtaactgcacagtagttcctgtgtacctaaatagaaggcaggcaagggagtggtgtggcttagagtttgggctctggagtcagactgcctggattgaaatcttggaactgtcattactggctgtgtgaacttggctaaattacataacacctcttaaagtattcttatttgtggagtcaataatagtgctttctttaaagaattgtgagggttaagagagagaatgcacacaaagcacataagcactctctggcgcatagagtggcactgagtgttagctattactattattaatgaatcaatgctagctccacacctttaacatgtgcctgttcagtactaatggcacgttagaacacatgatggggaactacattaaaggaagatcataatctttaaacttattcatgtgttatgttttgaaaagagaacttatgcctcaccagttgcagtgttggctgtgtggaagattccattatcaaaagactgaaattgaggagtaccaggaaaagtcaaggccctgaaatcttaagtcttaccagtttatttaacaagtgttccttggtagtttttacttgcagtaggaacattatatatttaatttcaggcaaatcaagaaaaaaaactttgtaagtcgaccttatgtagagacaaatgtttttgtttcacttttcccgccaaaacatgggttatagaaaagccattttaattacaaatgacaagataagtgaccagatgttcagtaaaatgttagaactacaaagtttttctttgaaaatgttacatcttgttcctacatgattttaaagattttaaatatttcattcattgttttcaaagcaaagagcatttgaaggagcttggtctgtgaaggggtcctgagagagttagaagaagttataaggattaagctatatttgaatttttctgttgggtgctgagaagaatacaatgataaggtccagatgatgcttccaaagggattataaggattgaataaaatactgtaaaaatagctttcatagaaaagtagaaagtgttagataatgaaagaaaaatagaaacagtgttctctgggagatattacttgcagctagagacctcaaggggagctttaaaaatgaactgatatttgaactaggcctagaaaaaaagtgaagttgataaatactaatacgcattggaggcacataagggaaaggcatcctcaacaaagtgacttgaatgtgcaaggactagaaatcagaggaataattatgggaagaaatcagaagaataaatatgggaagcagaaagtcatagtttatttcaccaagaatactagtcccaagagataacatgcacacagaggtttctatggtgaaattagttttggaaacattgggtactatatctgcctcctggaaatttttcaaacattacatattaaagattctgagcagtcttgtagtaaaaaaagtatttaatgttatttatgctagtttatttaattatgaaaccctctttttaagcaaaatacatagaaatgctatgaaacaattttttgccgatgcttattgggaaatgtaagcctgtaaaagtagatggagtcaaggtggtagagtgcctgaacgtcagagtgaagagtcagtgggtggatccatggaagctttctcatgaaagcttcccagataagtggatgagccatgatctggagactgtatgtgagatgggatggatcagagacctggaggagatttgtagggatgcatccaatagtaagtcttttttagcagactaagcctgaggtaatgttggtctaacctgggatagttgtggtagttgtagaagaaaagttatgaaaggaaaggagtagatggaattggggactattattctaagtgaagtaactcaggaatggaaaacaaaacatcatatgttctgattcatatgtgggagctaagctattaggatgcaaaggcataagaatgatacattagcctttggggactcggggaaaagggtgaggggttgtgagggataaaagactacacattggggccaggcacaccggctcacccctgtaatcccagcactttgggaggctgaggcaggcggatcaccaggtcaggagatcgagaccatcctggctaacatggtgaaaccccaactctactaaaaatacaaataattagctgggcatggtgacacatgcctatagtcccagctactcaggaggcagagacaggagaatcacttgaacccgggaggcggaggttgcagtgagccgagatcacgccactgcactccagcctggtaacagagcgagactccgtctcaaaaaaaaaaaaaaaaagactacacattgggtacagtgtacactgcttaggtgatggctgcaccaaaatctcaaaaatcaccgctaaagaacttattcatgtaatcaaacaccacctattccccaaaaacctattgaaataaaaaaaaaagaaaaaaaggaaaggaaaggaatatagctggcagttctttgatgttagttgtatgtggctgatacatggtttttagattcttaaatgtatttttttcacattttaacatatctaaaatcaggaagattttagcattagtgacagcatccttcattcttaacggtgcatgaagtcagatttactgaaatactgttgttaaggatgtttttgaggtaaagcaatacagtagcctgagagtgacttggggcttagcagtttctaacagtaagctcttcccttttctggaagagaagtgacactagaagagtatcctccagcctttgggccgaaggagatgctgatttggatcagagaaaaagggtgaatgaacatcagagccagaattccctcatgacttctgctgttcttcataggctttttgacctgtcagtaaaggagaaggaatccttctgaacttccacatcgcacttatttacttactagtctgattttatacgactgagaatagtgtaatttcaagcaaaatcttacttccttgagagatgtgggcttcagccttcatcttccagatattaacttgaccagatgagcaagcctgaacttcctgtctcaaaatgacttttccgcagccactattctttctctgcactatatctttatctgtagctgtaaaaattaacctttaaaacttttatttatttattaatgttttaagagacagggtctcactctatcacccagtctggagcgtagtgttgtgattataactcactgcagccttgaactccagggctcaagtgatcctcccacctcagcctcccaagtaactgggactacaggcacctgccagcatgcctggctaattttttttttttttttttactttttgtagggactaggtgtctctctgtgctgaccaggctgatcttgactcctggcctcaagcaatcctcctgcctttgtctcccaaagtgctgggattacaggtgtaagccaccacacccagccataataaacctttttttgcaccacatattatttgctatagttctcttaagagtcaattaatccatgttattttttattttttatgtactgtattttatttatttcttttctgagacagactcttgctctgtcacccaggctggagtgcagtggcgtgatcttggctcactgcagcctctgcctcctatgttcaagtgattctcctgcctcagcctcccgtgtagctgggattacaggcatgtaccacccctcctggctaagtattgtatttttagtagagatggggtttcactatcttggtcaggttggtcttgaactcctgacctcatgatccacccgcctctgcctcccaaagtgtgggactacaggtgtgagccactgcacctggccaatctatgttacttttgaaaaaagttcaaataaattgaaataagtctttactattatacattatgttcttatggtctaaagaactcaagaaatagttttaaaatcgagaacacacaaacacactcacactcacacatagaacctaaaacaaaactccccaaaacaaatatagattcaacaaaatactataaaaagccataaagcatattcagtatataatttttaaattgttctgacatatatgttgtttgtatacccgcacaaatgttactgtcattaaactaatgatcctattttcttcttctcaaaaaaagtcctagaaatctgtttgtgatggcttgatgaagtttagtcactttataaaaggttaagcttttaaaaacttttccttttttatttttagattgctaatgtggctaggtcatgagaagactctgaaaatagttttccttcattgctaatcgcagctgttgcattactaaccaatggtcagatcctgcattaagaacaagagactaaaattacaaatagtttcttctttttaaatcagagatgctggacttcccaaatttttgtcaggcagatatattcatgtgattttaggtgcttagaaaaagtttattcatggaaagagtttataattgctagagatagctgaacctattttaagatgactgtatgcccattttgagtttgaaccacatagactagggaatgaagaggagtcattttgaaaattttagcgttagctcagtatgtaccagtaactgaccaggttattatattagacatttcaacctcttcttcttttttttaatatttctaaacatcagaaatgctcaggttttttttttttttttttttttttttttgcgtccgtgaaatgttaaaaactattttgagttctttgggaaaaaagtgttctcccatgctgtaacaaatggaaccaataatgtgaaccttttgattacaaacaaagatcagactatttggaagggaaaaaaagaatatattggaaagtacatgggaatctaatgaagtccaaagatgaagtgaataataaacaagaagccatggagagctcaggaatgcagtctgacctctggaacaactagaaatgtgacacagaccccaatgatatcttcatctcacttacctatttctctttgtgtgttggctttttttcttctttttctccatgcagtagtatgaccattgagtttcctagtgattcagctttcacagtagttatatttgttgggagaaggtgggggagagtgagtttttactaattaaagataatgaaatcaatttacatatacccatgcatgtgcacacatgcagaaactaaaatattaaattcattccggaaataacaacaaaaataacatgctaaaaatgtgtgcatgaggaaaaataatgcatcatgaaaaattaaacataacctttcaacaacacactttgaaaatgcacaacacaaaaatacagttgtaggcagagggatctccctgaagaaatacaaagcagctctgttggctcctggttgctggccaggcctcttaggtggatgagcctttgtatgttgtttagcaatgtgtgtttcttatttgaatgggcctagcctcatgaatcatgaattgttagttcataagagtaaggtgttcttataagccaaaccaaaacattaacgaaacccaaatgctttttacaccagaaggattttaagaacacaattttagcttcttttagattgattgcggagcttgaagaaatattatttcatgataattccatcatttataatcaactcctctctgctgtttgtatgctgatccttgtaattctgggtaaaagagaacagcagtacattttgggtatattgtgtaaggtgggaagtggagaggtgttctcttgtgtagttactgagtccttccttcctgaaatgaatcgtaattctggaaaagtgaatacttgtgaagagtcgtcttgaatgatttgtaaaaaatcctgttcttatattcaacgagtttcgaatctttgtcagaggagtattaccattagattgaaaaaaaggaaaataaataataaacacttttaaaaaaactccccattctcttattctcacttttaggaaaagagactgactaatatcttctgccacaaataccgatgttcttaaaaatatttatgggactgcttttggcaaccagccctattttgttttcatatccctttttgctcccatctttccaaactcataaactcccaaattatattttccagttttattccacaaggtaagatttattttcccctaaaactttattgctttataattttaagataaaatattctaatacatttctttaccagttgatgtactaaaaatacagtgaatttttacttgtttataaatgacattaggaaaaatatatctgtcagatttgatcaatgttgattttaaacaacaatatggaaaagaatgattgtgttttttataagcaactagaagctaatgtaggaaagatgatattgatatttaagacatgctggcaaacaataacatataaatatcaagtaggctattttacctgggcacagaaggtctcttccaaataccaaaattgaatttcgtcattttatccagagttgaaattgattatactgagaataaccacttaatttctatctttatctgccactgttttttggttcaaatctaagctacatgttacactgttctccagatacactgtgtggctttttgtctatactgtccccaccactagaatgtccttcttcagctttagtttacaaaatctttcgtgatttattcttaatgctgtcattttcgtaagttcttcctgactgtaaatggcaaatgtaaaattcctgctgctctctaaatgctcacatcactttgcttgtactttctgttgtattaataattaccaccagttgcttgggttgtcattatttgtttctatgcccgggcttctccagggagctctaagcattctgagggcaatggcaaagtctcattcatcaaagcatgttccatatacctaaagtaaggtctaggatttagtgggtagtaattaaacatttattgattaaaaaccaacagttgattcacagattaaagaaggaaaaatagatattttagttttctgcttacaagaatttcaggcaaaattgtgcaaataattcagtttaccgccttgtgtttattttattgattaatttccctatgcatagaaaaaaggatcattccaagaattttaacctcattgagacaatttatattttttctttcaatttgattcagttatttgggatgactatttttctcgacacactatcgacaaagacaatgttccattcctttttggggaagaacaggtagctacattttaagcaaagtgcaaggtaggctgaatacactcgaaaaaagtttggaaatgtagtgatataaactcacaatatagtagatcttatacacattcagtgttacgcatgattattcgtttgctaggtgctaattgggctttagtactagacagctattatgaaggatttcctacctaactaaaccaacaccatgatcttccccaagaagaaagagttgatcttgggaagtttggaagcacagcttttggatcctttgttaccttcctttttggagggaagactttagaggaacagatactcttctcgctattattgcttaacagtttttttgttgggaacataaagagcatatgatcctcttcaaccccagaatcggtcttgccctggctccacaacactggcaatgagaggttcccagaacagcaagattattggaaatttaagttttaaacaggttctcagattggtttcctattgaatttccattctctgtcttttctttttttctttttctttttttttttttgagacggagtctcgctctgtcgcccaggctggagtggtgcagtggcgcaatctctgctcactgcaagctccgcctcccgggttaacgccattctcctgcctcagcctcagctgggactacaggtgcccgccaccatgcccggctaatttttttttgtatttttagtagagacggggtttcaccgtgttagccaggacggtctcgatctcctgacgtcgtgatccgcccgccttggtgtcccaaagtgctgggattacaggcgtgagccaccgcgcccggccgcattctctgtcttttcactttctaatatttaaaagaggcagctcaaggccacacttacccccttttagtgtccattttaatctttccgtggtctgtagtgcacagatttagtagactccaatatttcaaataatggccccatgccccaagtgttttccttacagctctgtagacatcatgtggtaaaacaaaaacattaaaagcattcagaaaccaaacaaaacagaatagctttggtgttaccatttatacttcatttgaattactggatactagttctttgtagacatttggaggtttctccgtaaagtcctgataagaattttcagaaaaggaaggcatagctcttaggtgactgagtatattggggagtagtgtggattggtgacacaatagagtgctttacagagctagaggggatcattacagtgaagtatttctgagcaaggataggcatcaaaaatagggatggaaaaaaagaatgatatagacaagaaggtggttgagataatgtcagagacaccctaagcaacacttaaaatttggcagaggtgtgattttttcctcagtttcccccttgctgcttttagtagtgttctggtgctgaggaggaggctcaggatctggatacggtggacatatgcttatggtagatgctttaggacagtggttcacaacctttctggcaccaggaactggtttcatggaagacaatttttccccagatgagggtgagggattggggggctggtatggggaggacaccgttccacctcaggtcatcaggcattagttagattctcataaggagcttgcaacctagatccctcacatgtgcacttcataatagggttcacacttctatcagaatctaatgcctcagctgatctgacacacgaggcagagctcaggcagtatgctcattcagccagtgctcacctcctgctgtgcagccgggttcctaacaagccacagacatgtaccagtccatgacctgggggttagggacccctgctttaggacatgcagaacaagtttgtaatgaggactgcgacctctaggtcaagccacatttttcctaaaggtaacattttatttggagtatttggaattttgaggagtgcgagggtggggatggtttgaaggaactgtgattatgttaaaaattaacacctaatggattttagatggttagacctttgtaataaatggaattcataaagcctagcattggcaaaaatacatatcaattttttttgacgagatacagtgtctaatagaatgttagcgtccatctttgcatctaaaataatttaaaaacaaataaattcacttgcacctaggcatttttactttctctttcatctctctgtatatgggtgggaagtaatgtgatacattgcccagaatgtgaagagtgtgagaggaacacacacaaagtggttgccaagaatgtgtctgggaattagacacgaaaaggaccacgttcctttttcttctcataccacgtaagattccctgtggaattctgcttgttcctcagggaggaaaagcaaaccatgagttcctggcaatattattggctatgagaaagttaaggaagagatactgagtgacaaaaataccatgatgatcgaacaaattttcttgttattaagcaaatcaaaatggaaggcccacctttattggctaattattatatgttagtgaagtcagaatgatttataatagtgatagacccagaaagaacctttaatgatatgcaaacacattagttttcttgtattaaagtgatctgtacctgttgacattattaaatgactcccatgctttccattctaacatgattgcttttgaatttgcattattaaccattatagtttttctatgtacaaatggtgtataaacttctctttggaggtgctgatatttaatggcctattcttgggaaaggttgcagggagaatattatgatccatagggcaattttgaaattacaattagtactctgttgtcttcctaggcatgactttcatagtggcttatcttgtcctggtattttaacttcttggctctcttattcctcacacataccgtgtatctttaatacttgaccacttgttaaaactaatgagattgttttgaaaacgtaaatgttagctcaagaaaaaaaaggaattactttccaaggcacgtcagagtactatataaaaaaaggggaaaatacagactttagataaaatgtcctactttacagtatatatatatacacataaaattatatagataattatctgagataactataattatatagtgatattacctatataattataattttataattattatatctatataattttattatatataattattatatccataaaattatgtgtatagcacaacaccaacagtagatctggttttaaacctgagttagtttagctcttcaccgactcttacccagactattgctatcacatcttcaaattttgtttttgtctctgtggatggccttctgcaatctatcctgtatactattgttaatgtgttaaaacacagatctcactgatgtacctcattacaaggcaatacaggatactcagcatggaataaaagccagttgttattgagtgttgtttgcctctccagttcttttttttttttttttttaagatggagtctggctctttcacccaagctggactgcagtggcgtgatctcggctcactgcaagctctgactcccgggttcacgccattctcctgcctcagccctcccgagtagctgggactacaggcgccagccaccacacccggctaattttttttttttgtatttttagtagagactgggtttcaccgtgttagccaggatggtctcgatctcctgacctcgtgatccgcctgcctccgcctcccaaagtgctgggattacaggtgtgagccaccgtgcccggccacctctccagttcttatcttagtattccaccttcaacttgatcctgcccatcaacaaagttaatgctgcattaatcgttaatcatgctgcttttgtactttttttgtgtgtgtggtggtcgtcattcttgttgcaaaaattagttaatatgtcagatcttctgtgaagtcttttttgaccatccacccaagtataagtacttattaaccatgtatcctattgctgcctgtacacatggcatatatttctcatactgtaattatgtacttatatttctgtagtcctgtttaggacaggcacttttcatctctgtattccccagattgagtgtagtactgatacttcactacatgtttattgaattaaattctttactgttaactaggtttagtgagctctgatgtcacctacaaatatattatcagccccaaacatttaatctcaaccatcaaaaatttagcacaaccaccatttttatcgtatatataggaatggaatttttttttaaattttcagttattttgaatagtaatttatttaagccttcctatgtgtcatggaccctgctggtttcaaacagattactgtgattgagtgaataaacatcaagaatcttttatagagggatttaatattattgtaatcataacgctggttggattagggtttgtttatcatgccattatcttcaacaaggctcatctgctgcctcttggattcagatgctgctcagtggctccagcctgttctctctgaagagaggagaacttaacaaatggacattatcctcaagagtcatctctgccagagggctttgtggaagtgatttgtgagaataattttttttttttttttctcactgcatatctcaaatggcatgtttttcaccactgaaaataggaagacagttcttttgtgtttattaaaaataatagctaacttattcattaaaagaaaaagcattcttaattgtggcaatggttttgtggctttggacattaagaacaagttaaatttttatatgattcctcatccagatttttctcaagattaaaaactaagattcctagagaaaaacatttttttctttcaattttcacatagaattcttgccgttggagaattctgagatcgttgggaggaactttgtacagtgatctgtagacaatagctcttgactgtctgtgttttctgccaggttgtgtgtgattttgtaatacttccctagtctaggccgtatgcttctgaagagtccctgccatttcttcattccgcgatgtcattaagacccctgttgcttttatttgaaaagtatacaagctttggaatcggataacatgtttcagttcaccaattaatagctgtctgaccttggccaaatcaatgaactgttctttaaagcagttttctgaggtgtaaaatgagaactttttcattgaccttgtttgtaaatattaaatgaaattgaatgtttatagtaaataaaatgttaacattttatatcaagtgaaaaaatggaaattaatattcataaatattaaataatataaaacttaaacacttgtaaatattaagtgaaagtaccacctacagtctgaacacataatatgtgacttaataaaaccgtttaggttactttatgaagcaagcatttggtttcacatattctgtgtaccacacttagtaaagcttagcaatggcatcgttacattagatcaactggacagaacaataaaagaacaaatctcctccagaagataaggttttacaaataagtagtggcaaggcaatccaacttctcacctatttgattcattttttaaaaatttaggtgaatgatatacaatagctgctctctttaaatttttttcactctgaggttatttcagttgtgcatactaccaaaaaatatttaaaaaatcaaatcggctgacagaggcaacttgaataattaaacattgcagggtggtgtgcaacagggaaagaactgccgcactaggaagaaggggtcccgcgatggagacgctcatcatttactatgagtctgagaaactcagttaaccttagagaatctggggtgtgaaaggaggctatgatacctttcctacctggagatagggagctgattcaggtaaaatcttgacattccttcaggttctgaaactctaatactaggagttggagaaaatgtggactttttctgtgagtatctatttactattataagtatatttaggatgaataggattgtgccttagagtttggggagtatcacagggaatttgttgctctactcagtccttcttaagggctgaatgaatctacttttatttttctcccagttgtgacccatgagctatcagaatcccagtactatagtttctcttttcttttagtgatttattaactactgttagtctttttttaatagggttattaaggtcaattaaatagtaaggaaagagaaaacttaagtagacattggtttgagtaagaaaaaggcaacagaaataaaaccatgttttgaaaagttgggtcagtataggaaggtaatccttataaagtgatcattctaggtaggcatcacatttatacacccgtggacttcttactaaactgacctagattgtggtgacctgtgcttaaatgattcttaaagtcattctcaattccgatttccagtggttatgttacattcaatagggtgtagcctttggaaagatctaatttctcaaatgtgccgtgccattccatctgaatagtccagtgatttcaaagacaccacggaggaataccattgatatcacagaagtcctgtcctttcttaagatgaagagtatgaaaaatatccaagcagatgcagagaggccatctgtcttgagactctagaggacattcctatactgggtggagaattgtactaagtgggcttgggagtctttcgcaactcctcacatttgatttttttttttcattttaaataaatgatcatttagaataagtagagctctgcgttttccttgaaaagtaggatggaattcatgaaagggaccagcgaatgttctcttatgccctggtctgtgcagtactctatgcagacagacacttgacagatacccttgatatttcctttctcttcctttgtgggattgctttgaactctgtaggagacagtttagaatataattgccttgtcctgctttagggatatgtaggcgggcttaaatacagatattctcaaatagctggttctagtaaactaaatgcccttcctgaggaaatatatgggttgtagatgctgaaataaactaggttaaaaatatttattacacaaaagagatgctaactgaaagaggcacacatccttgttctcccaacagtttctcacttgtaaatggcatctctaaagggttgtccaaattcctagtgtgggcatgtagagtagacagctgagtcacagctgctgaaatgagaccatgcctccctcccgctcgtgaagggaagaaatagggagaaaggagtgcaagagaattagtgccaacagcttacttaaaattcactggcttgagaagtctatgagattcctgggccaaccggaagccattactctaccacgtggagtgtctgaagcatgaaatctgcctttccttagagaactcttatcattggccatagtttgtacaaaaatgtatcttctttctgcagagatctttcctgtattgcaggaatgctagtgttctctggcctatcatatgaggctgctggcctaccattctagtttgcattttcgacttggtgatacctggccagcatgttggctttctcctgaagtttgatgtttctcttccccttgcagtacatatttgaaaagaagtttggaactgccagctttgcttggatttgaactatggcttggtgccttactagcaatgagaccttgaacaaattactcaagctctctctaccttagtttcctcatcaataaaatgggaatgataataatgcccaactttttaggttgttgtggggattaaataaattgtttcatattaatgtaccccccaccaaggtgtggggattaaatgaattgttcagattgcttagaacattgcctggcttgtcgccactctgccatcaatggctgctgaatatcctgtattggaagtagcattgaagatgattggaaagagatattaatttaccagcaaattaacactccatctcatagaaagagcactaataaattaagatctgctccatatcaccattactaatattgttttagaattttttatggatttaaataattttacacacatacagaggaaaacaaacagtattatttagacattatgaatttatacttagaaggcccagtagcatcaattgtaaaattactagatttagatcattagcaaaatatttgagactgcaaattttcaaaaagaggtgacttttccaaatatcatcaataaattataagaaagtataatgtgggaaaggctagaaataaatataaaccaaaatattagcacttactacttctggtttttgggaatatatgtgatcttttaaataaatttaaaaagccctattgtttacgtagtatttactgtgtgctgtgaactgtgttaagtaatttttgtattttaaaaatagctattggctttacacttcatttgtgttctgaccaaatattttcattagtcccctttgagatccataaagcctttctgagttttgtgaatgtaatgcagctaaagattataattgtaaaactgcattccaaatggcacgtattgtaatttgctgctacttatatctgcttgaagctgtcaatatgtagagaatagatttgatcattgaactgaagtaaaactgctctcaatttaggagtgaaaaattttaaggccccacctactttctctctgggaaaagatgtttctgttttctgtgtgtgtttatattttctctatttaatgtagatagtaatgttgactagtttacatctgacttttcttccaggtaacattgagatttagaaaaagtacaatatggctggcaccctgagtttttggagagcttaactttgtgtccgaaatgcttaagaagaggagtgtgttcatttgctgtggttgtgattatgattataaacttaaggctggtaggccgggtgtggtggttcatgcctgtaatcccagtactttgagaggctgaggtgagtgaatcgcatgagctcagaagttcgagactagcctgggcagcatggcagcaccctgtctctacaaaaaaatacaaaaattagccaggcgtcgtggcatgcacctatagtcccaggtactcaggagtctgaggcaggaggatcacttgagctccagaggttgaggctgcagtgagccaagatcgtgccactgcacttcagtctgggcgacagaacaaagaccccatctcaaaaagaaaataaacaaacaaacgtaaggctggtaaggaagttttgccactgaaggcccagcctcagccaagttagtgattgggcaggaagtcagctctcaccctcacttaccctgcagttcccctcccctgtgacttctacaccagtattttatagtactataaagttttctttgactcacacagttctcacttcacccttggagatgcagttaatgccgttgagtcagattcagtagactttcactcattatgctgttagggtctttaaagaaatcacagatactccaatttaggactgcctgttgtggaggttaccacagcccgatgcaaggccacatgacaaatcattcatagtgatttttaatgttttggtagaaataatatttcttgaaaacatgactatgttattgccaatatctgcccagcaaaaagtagtttttgtctcttttacaatatgctcagaatatatgaaaaacaaatcttcatatgaaacatagtcaatcctttttatagattgttaaaggggactgagggtgaactgcagaatcctataaattggatgattctcgttttgtgggtatatttacttgttgagctgatcgcagcagggagagggtgcacatatttccttctagatacagcagtccttcactggttggaggttaaaagctgttgaaaaataacccgaatgcatttcatgaaagaatcttagacaaatacaattacttggaatatcagctaattgcttgctctataccatgattttcatgtcttacttcctccagcctgacttcctccatgtaccttcttggtctgagtaaaatctatggtaataaccaaatcgtagactaaaattaatcataatggtgagggctaaaaggaggggttaggaaaggacttgaccctggatggtattttcttatttttcttagtacatttaacatgtgtattagtccattttcacgctgctgataaagacatacctgaaactgggcaatttacaaaagaaagaggtttaatggacttacagttccacatggctggggaggcctcataatcatggcataaggcaaggaggagcaagtcacatcttatgtggaatggcagcgggcaaaaagagcttgtgcaggaaaacgcccccttttaataacaactacaacagcatgggaaaatcctgcctccatgattcaattacctcccatcggccccctcccacaacacctgggaattcaaaatgagatttggttggggacacagccaaaccatatcaacatgtaactttacaagttgattgtattgtagaccactaattgaaaatgctatttctaggaacagactttattttactaatgccaggctatgagtaaaaatgttgaattaaataatgttatgagtaatagtagctaggtagtcacagtcatagttcaagcatttcataatgaaaatatacatatttacatcttctggcaaagttataaacccatcccttccagataaagcagcatcagaaatacttatgatgtgtctacctctattatacctaatctattttgcattctgattttatcttcagaaaaggcctgcagttactgaaatgacaagtgaaaaggaggtaagttatgtaattagatgtcaggagaataataggaagttatagccatgttttagataagtttattgttggctgacttaaaatgctattggtgtaatcaatcttttcttggatagcttatcataaaatgttgcttcccataagtagtttccctgtgtttattttcttaatccactaaattgctagctgaaacagttcgtggctaggaagggacacttttatgtcacatatctcctatgacactgtcttctttccatttttgtaattgattcaacatctctttacctctgtaacatatttggatctttttattctgtcagcatttggccaaataattgctagatcctatgttgtttcttaaaatatgctttgtcttaatcaattgttgagtatttagattctccacatgaattgactatcatgatatcttactattattcattagtccaaagtttgagggtatatttgcaagccattttgctctcagtgcccttcaagtctgttctttcaattttttcctatagccattgggttcatctaaaaagacccatagacattttgcttttgcttctagcagtattggtagccttagcttgtatttgtaggactcaggactaaacatatgccaacaatttatgtagggtagaagtgaaaatgctggattatagggcaagtatattaacaactttggtaaatgaaaccaagttgccctcaaagtaccagttgtcctgttgttatctcctctatgatcaatactacatattgtcaatcctttgcttttttgcaaatgatatagacaaactcttcatttttgttgcaatttgcccttactcgaatagtgaagctgagagatttttcctgtttattggaacattaattaggggtagtttttttttgtttgtttgtttgagagagtcttgctctgtcgctcaggctggagtgcaatggcacgatctcggctcactgtaacctccgcctcctgggttcaagctattctcctgcctcagcctcctgagtagctgggattacaggcgcctgccaccacgcccaactatttcttgtatttttagtagagatggggtttcaccatgttggccaggctggtctcgaactcctgacctcaggtgatccgtctgccttggcctctcaaagtgctgggattacaggcgtgagccactgtgcccagccaggatagttttatttttaataattacttgccaggatgtccgtgtcagaaacacattgtaataatttattttatctatttttagtgacttgaatatttcaaaatataaggtatggcttgagatgagaagtgagtcatgaaagctataatactacagagaagataccagacttcaaatgctatcttcatactgctagtgctttaatctattatgcaaatcatatttgccagctttcttcccccatacttgaaatttaaaaacttcttggtttttatattttattctgaagaactgtgttcacctttttaataaaccttacaatttgatagattaaaacttggtcattatgttttagagcaagggctggagggaaaattgaaagaatgttgaataaatgagttttataatactttagtgaatcattttttctttcttcttcttcttcttcttcttttttttttttttttttttttgatagggtcttgctctgtccatcaggctggagtacagttgcacaatagctcactgcagtctcaaattcctgggctcaagatatcttcccgcctcagcctcccaagtagctgggactacaggtgtatgccactcctcctggctaatttttagaaatttttgtagacatggggatctcgctttgttgcccaggctggtcttgaactcttaggctcaagaaatctaacccctctgtcttcccaaagtgctgggattactggtatgagccactgtgccaggccccaatcatctaactctgatgagatcagaatatttcaagtttggagatcttctcatatgtactgttcttaggaaccacgaacttctgatatactagagtttgaagcaaaagaaggttcacttcttatctccattaaattattgcctgtgggttggacaagcttgatctagatgttttcctaactaaaatactaactaatgatgacttaaatgtacacagcacttagcttctaatatcataggatattgtggagaaattttcaaattaattgacacacgtttctaagtagtagttggaagcagaaattggagggagtccaaatagtttctttgttggtatagaaatgaacacacacacacaaacctgaatcttggtgagatccaatgtaaaatttcattcactattcccccctttaacactgtctttgttaggttagaatggccattgacttacatgtcacttaaatgtctgtgcaaagcagtgctttttgctgcttgggaaatctttatgtggtgattccactaaatggtaaccatatgcactcaactgagggaggaaatttgaggagaaagttactgtgattcaggtttcagcattgatttggttagaagttgacacctttaaagattatcttaaaagtttcactaaaacttcccttaaaacccagagtgctgtctttatgagaaagggagcaaaggtccccgacatccagggttctgatgtcagtcaacattaacaaaatgatttgcttgtgtttgtgtgagtggcttgtttgctctggaccagacagaaggctaaactgtcattaaattatgcttagaatgagaagaactggttaatgtatccaatagcaatagttaatatactggttgtaatgaggatgatatccaattatctattctaaccaaagaaaatgacagaaaaaaaccatcattctttagtcttaagaattgtgttttaagaagtttgaaaaacccaaacattggcccatatgccttctatgttaacctagtctagaaacattttgatatgcaagggggttaatattaatgaaaaatataggaagataaagttttatatatataattattattattatttttgagatggggtctcactctgccacccaggctggagtgcagtggtatgatcatggcttactgcagccttgacctcccaggctcaagtaatcagcctctcgggtagctgagactatagtcacgttccaccatgcttggctaatttttttttatttattttttgtagaggtgggttctccctatgttgcccagggtagtctccaactctgggctcaagtgatcctccttaaaaaagtgttctttttttttgttttttgatttcaagatgcattttaattatttacataaattaattggttatctattttcttgaagtgtatttcaaagtcctacaaaacttaattgttgacctccttaaaatgtagttgagtatacttaaatttcctttgccaatctgaagtaaaactttaaattcaaaccctcaaagcaggtctttgcccttcctctaggaggttgggtcacggaattctgttttacgtcccttcataaaaaaaaagaaaaatgatctctctcccatcatgcttgagctaagtcaggagcaactgctgaaataagccagtgtgtgtctcatatgggtgaagtggagcccaccagtaatcagtaatctctccaggagaaacaaaacaaaacaaaacaaagatatgtttaaatgtgagcttgggtggtttccagttttaccaaaatgtaaatatggcttcagttgagaattttatttttcagtacatttactctctgttgctttgttcgatgaatttctctagattgtgtatctaacactaagtgaaaaagaccttttactggaatagttaaaagtataaaaaataggaaaagaaacttgggtaaatatactcactaatgatctttgggaaaacacctggtttattatcctacagtttgtgcaagggctactgcaaaaatagtccgaacaaaattgcttttaatgttttcaaagatagaaaattcactggtttatacatgctttagggggaggtgaggtgaaaagggaaggttgccaagcaagagtgatagtatagtgttaatgatcatataaattttcagccttaagtcaccctatttaaataaaattatttgtagaaattttagttaattagctaggcttttatagctttttctattaaagaccctttcctgtcagtgatatcagggatgcctgagagacgttgatatattatatggttcaaagtttaccacatgtctattctcataggatgcagcatcatcatgctaccaaatggatggaatggggaataccttctcttgaggttgtgcccattggaggcagctgtactggataattctgaaaatggctaatcctgcctcacttttaggagacacttaatgtagtgtttaagagtaaagaacccatagtgcctaggttcagcccctggctctggtactttcttgctctgtgactcttggcaagtttcattttttcttctttggggtacttttcactaacatgttccttttacattttcaaaacctcttttcatctgtgaaatcatttctatgggtatttggcatgtaattaattacccattagctccaataatgaggttggatgaagtcacatacttattggcagagctgcccaggtctcagaggcttatttttgaattccaacttgtacctgagagctaaaaattaggtaagatttggattgatcacacttcgggatcccctgctacaatggatatgcggttacctgtatttaaaacaaagaactgatgacctttttccttttaatagctgattccttgatttacctaactattcttcattttatttcatttatggaaagagcactgaactagtgaagcatagtaggagataacttgcacgcatgtatgcatgtatatgctagggcatgaggtatttcccactgtggtcttacaagcttgaagcatttggacggaaggcccttgaaagtgtctctagttctcaccttttctagtctcactttattactcatactgcttgccagccaaacaactgatttggtttcagatgtagcactatcattctccatttctggttcagttgcttggctgtggctcaccgctactcctcttaatatgtgagaaagaaaatatggaggtgatgcagaagttaaaggttcttggttgtaagcttttaaccagactatgttctgcctatggtttaagatcagagtgatctaaaccaagggctggtgaactttgggccaaattcagactgtggcctgttttgtgaatagaattttattcaagtacagccatagctatgcccatttgttaggtattctttgtggcttcttgatactatgacaagagttttgtagttatgacaaaaatggcatggcccacaaaactggaaacatttactaacttgctttttgtacatgaagtttgctgactcctacgctaaaggaaggtatttcctgactgtttgaaagtatatatgatgagtgttcaggtaaaactggttttggcaatatggtaatattgccttcgtataaactatttttagtctttctgtgtatattagatggaaaccatatttctctttttgttaagggcttagctgttaaatatgtgcatctgtatagcatatagagaataaactgggaagaataaaacatgaaaaaataaggatgcttttttaaccaaaaaaaaaactgtgttgggtgttaggagcttgacatgcattatgactaatcctaacaccactgtgctataactgttattattttgatcgtactggggaggaaattgaagctaaaagaggtaaaatatgaaagctatttatgtatttagccattactccaggctgtgtctagatatattgtctctcttctattacctgcgtggatgatgtatggcccatacttaaaattcttaagccttattcatagatgtataagggattttaatgttgtttctctgtaaagatgaagggggtggaactgaacttgttattccattctggataattcagtcttattgaagattgtttatttagttggagtggagcatctgcttcgaataatatacagtttgaatagaagtcttactagctaaataatcttggattatatgaacatgtattcttggctagagatggaactcaagggatgaacaattagataagtaacaattgtgtttgaagtgagttcttctgtcatcattaagagttatttctacctatcaataaataatgggtttggatttcctgaaatgtgtctctagttgtttttccttaatgaaggagttagacctaaataatattttcacaccctaattaactacaagcagggcaaaggatactttcaggatctcaagtgattattatttaaagaactcctattcataaattttctgttttcttctagtagatcctctttggtaatgaaccagagcaatatattatgaccagtgactcataaatatgcccttaaaaccatttgttacttgtatctacttggaatttttcctattttaatttcagtacttaaattggaaaacaaaagtgttgcttatcattagagcaggtataaagtacctaaatatttatcacggtatgccagtttttattttgtaccttcagtattcccagaagtgtagcgttaaaaggaaaaaaaatgattcgcatatcccagtatatttcagaggaaataggaactttatttaaaagcattaatttctggctgggcgcagtggctcacgcctgtaatcccagcacactgggaggccaagacgggtggatcacgaggtcaagagattgagaccatcctggccccacatggtgaaaccccgtctctactaaaaatacaaaaattagatgggcatggtggcacgagtcccagctactcaggggaggctgaggcaggaggatcgcttaaacctggaaggcagaggttgctgtgagccgagatcgcgccactgcactctagcctgggcgacagagtgagactccatctctaaacaaaaacaaaaacaaaaacaaacaaacaaataaaaccattaatttctatacttctgtaaggtgtttttctgggaataaactgtattactcagattatcaatagaactgcatttaagatatttagtaattttcattctttttacaatttttgtgaaatatattggcttttttgtaatgaattttgtagatcatatcaacaaatttatatcatggtttctgattagcatagatagatgacaaagttagcttaactcagtattgcatgtgtcctaatgtgacatgtattaatctttctctgtgtcctgaatggaagaaagatcattccaagttgataatcacttacatgagcaaagttatgtatcacagcttaattcacaattggagaaggttaatttgtccatttttgaggatcatcaagcagctttactaaggatattgtattttccaacttattttgtcttggactttctttttacttgaaaaaactatatatattccaaaaatttaagaaaatgcttcatatcttcagctaaataaagcttgttctttacaaacagtaaagaaccatgaaagataattctatttgtttcttgctactgtactcagtcagaaaattaagaatctagaggtgccatggaggggagagtgtggaagatcctaggacaataatcttttaaaagaatgtccttcatggctctccagtgatctacgacttttcatttttcttcagttcaactttgtttaaattaacgtgaccccaggttttattgaaaagtttgacttcagaaaggacttaaatttagtattcattttttcctgattctacagaaaatgtctctggttccgtgttctctcatagagcttttaccctctgtttaaataagcactcaagaatctaaatgctagatgtttaggcaatatagttttggggtcaggggtacttacttttctttcctttttatgtttaatctttttggtgtctaatactacttagtaccacatttttcaccgagcagtttcggagtaaaaagatattctggcaagttcatatcagcttgatttttattttcagatgaacaggttgccaaccccttaagtggcttgctatcatagaaacagaccatttcggtgatagatctgtcccttagttgattgattggcgtagaggaattagcagtctgtgaaatgctcttcagaagtaattttcctccaaaggtcaaggaactgtggtcaccatttctctggcatgatttgcagctactcattgtagccttattaccagtagcaaatgaaacagctgaaatggaatgtttccttgctcatttttctttccctctgcctaactaaatttcttgaacaccagtttggtattacctctttctgttctgccatctgccatccagctcagtgaaactttaaattcataaggtatgttttaatttatgaattaggagcttgctatgacatttctctttttaaatagatttatgtaatactatacataaagatgtcttgaactcaagaacatgtattgaggaccacgtatgatagaggacttggtgtttaggcctttctagtgagtcctaaatggtcaataggaactgtatatgatggaattagttcaggatatattatgcgctctctgttacaaggttgaaacaaattattttcctctgtttccctctattcctcttttaactcaacatgggttattaccatttttttaatgtggcttgaattgcctcatactcttggataaaatcttttaaagattttaatacagctgtagaacaaactctaaactcctttttctgacatctaaaacttttcgtatttactttcatttcttcctagtttcctatgtattctggatgctcattatacagagttatttgaaatttcacaacatatgatgttcctttagagttatatgcctttgatcttgcttttcctctagttttattcccatttccattctggctttgctctgtttggtatatccttcctcatattcactatgagtaactcattgaaaccttccctaaccaaccctggtgtgggtagccaattctttaatgttctgtggaattttcatcatattattatcccgcataacacattgtatttattttaatatatatgtctcccatagtttgtctcatttatcagtccagttatttttgcatttcctatcatctactccagtatactgtatttgcccttaaccttgaaatacaaaattctttacaaaaaaatttgtaaaagttttattagtatgctatattttatgcctcttggattagaccttgttgtaaattagaaattaaaaattatttaaaaagctttcttattactcaagtcaagtagaccagtaatgattttcaagactcctttgacaaatttcagatagggaagggatgtgcaacaaatagcaagcattgacccacttattttgtacagctactcctagttgttattgctaatcagaatcctgtagtctaaaattaacagtggctatgaaggagagcaattaaggccatttgtctttcaaatgagtcaatgtgggtcccactggtagtttaaatttatatacagagggcactcacactattataaagggtaatgggggccctgaaggcctgtgttacaaagcagtaaattattttagagtttgatagcaaattatattttgagaaaaactttcctcttgctatgtgaagatacatttcctagcaacctattttcattggttaattttaaattaaaaagtacatcttttttaatgagagcatttataaaaggtctattttaagcatatttaaaagacaatattaaggttttgagttctcgagtttggttgttttataggattgctgtagtcataagagtgattcaagaatacactcaacatattctccttttggaaaagatttcagagcttgtagtgccaccatgacatctctgatgtctcctgctttgcctgtgacactgacccctccctgtcattggtgagcagtgtaactttcacttatactcagattgccaaacttttgatgaggaaagtaaattccttttttttacagagaagaatttacagcactggagtttactactccttagtctgttgcttggtcagagaattcactgagtttctgcacagagatccctatggaaactgaacaaatacactatttgaaaggagacaggttattggtttttctcattaaacccactgctggattttcgttagttctaatgcattttctttcaagatgagacatataggccagttcttattttcatgatttgaataaactaaatatgttgagtcgtgtgtgcctgtacacatcgcctaagaagcaaaaataatccttctacttttgcaatacaattacccctgaaaattacgccagaaaaaccatgactgatgcaaatggggaatgctacccccgtttaaaaagaccaagttattaaataaagtgggaacggtgaaagtgattataggctaatctgattggttttatgcttgagtcacccccaaccttttaaatcataattgtgtatgaaagtaatctaaataaagcatgaaagatatcacagacctcaaacactttagaccctaaaaagctttatgtttcattggctattatgagatttcaaagagttcttttaaagcaaagatgttagtaaaacttaaattatttcaccttcttgaacttgcattgtagaggaagacaactttcactcttattcttcctctacttctcaccactaaagttactaaaaacgatttagactccaggtggtttgtgaggcaggagaatagggtccggaggcagggaacctaaggctgattcacctgacgtcctagaactaaatagaaaggaaaaccccaactttccaggccttagtaacagaaggaccacagcgtactccctttgcaaacttccttgttttctgagtggtgatggaaaattgaaagtacctctgattggttgcagaaagtactgtaaaatgttgattgcgggccaccacttcatttacatgaggtgaacaccaagtggccaatcggaaacctctagggaggtatttggacctgagaagattccgtactgttcccttgagctgctgctcgcgcactcccacagtgtggagtgtactttcattttcagtaaatctctgctttcgttacttcattctttcctcgctttggtgtggattttgtccaattctttgttcaagacgccaagaacctggacaacttgcagtcaagatcctctaccactaacactttgtatatttcaagaaagcctgacttatgcatgtatctattatttttaataattcaaaatctgtgcctcagtcttccttctgggtctcaaatgggcttctttttcaaacagaaagtactgatagacatttatttttctgtgaaaatttaaagagaatagtgataaacaggagtaccatttattattaagattgtgagtaacattatatatatcaatataacatttccttctccagaactttcgttatgtttggaaaatctgtttagaatgtaacagtagtcttcttttctcctaggtggctgtacttttgatgatggtccaggggcctgtgattaccaccaggatctgtatgatgactttgaatgggtgcatgttagtgctcaagagcctcattatctaccacccgagatgccccaaggtgagagtcactctgtttagtcagtgttgggggaatagttttgcagtatctatgattttcttatttaaagtgtaacaacaataatttaatggttataataagctaaattattgtgctactggatcacttctaagagccttattctttgcctttcccttaataactttctgtaattctgtattccttgttgtctttgaaaaaaaaaagataagtattagtgtttttttctatttaataaaaacccaagtgacaaaccaaaaatcaaaaaataaaagaaaaaacagaataaacaaaaaaaaatcctttccaaaaaattctcaaatgtgggatcagctcttttcgtagttattcaattaaattgtatatgttggatcgaatcagactgaagggaaagaattttattacattgtaaggagagaggttgtgtctttctcccagtggtcatgagcatgccagtgactctgaggggaggcagtgtggagacaaaagtatcaaatggagatcttttatgtgggaattatagagaaatagggccagatctgttcttttgttgttgttgttgttttttgatatggagtctcactctgtcacccaggctggaatgcagtggcctgatctctgctcactgcgatctctgcctcccaggttcaagtgattcccctgccttagcctcctgagtagctgggactacaggcgtgcactgccacgcccagctaatttttgtatttttagtggaggtggggtttcactgtgttggtcaggctggtctcgaactcctgacctcgtgatccgcccgcctcggcctcccaaactgctgggattacaagcgtgagccaccgcgcccagcatcttttcgttttttaccttactttgttatatcctttgattttgggttttgggagataatataatttataattgtttaaaacagtgtgcattatgtttcatcttaggaaaaacacattaacataggatgtcaatatttacataccatttcatacaatattggactaatagttgtgctttcaattctgcatattaatctggagcaaattccaagttctgtgcgtatatgcttagcaataacattaaattgtgacattaaaatgtaaacaggaatttaaaaatacaacatgaaagagaacaaactcttttccttccaatatttagaaagaaacaaaaatagtacataattatatattatatatagttatgtatatataatatattatcattatgctattataatatataatataattaatgtgctgattgcttagtactaataatttaggtttcaaagtatatttagtatttttattatgattaaaaatggtttagaattaatttttctacaaaaagagtaagtccttcttgagtgtgaattttagatatgacaattttagacatagccattagaaatgaaaatgttaattctgcttattgaagagagaaaattctatcagcagcatccctgaacttgctgatcaatgtgatttaaaaaaaaaagtgaaaacatcaacaataaacaatttatcacaagcacacaaagtaaataaaacctaaaagttacatttctaaatgtaatttttagtttgtaaatgaatatggtaaatatttccttgaaaaattttgtgttggttcccccgtgatgtgtacttttataatagaatgaattaaatttgctttttactctgaattgtcactctccgtgattgagtaggaaatggttatttttgaggctgaactgagccataatttcctttgcagagggaaaactggaactgtgtggttgacactctttgtttcttatatttgacccctactttgtcagcagactcatttaattttgtgcgtagatttgtattttttctttcaaaggtatgtaaccttattttcctggtgcattttaattaaactactgtaatttttcacctgaattttctctgtggtatatttagactaaacttttcatataaaattaaaggatgtgggtgggctgggatgcacacattttgaatgtttatcatcatagaataataagaaagatgttgatttatggaaatgttaccattgctaattaccattgatggtgggtaatgaatagttgaagaattactgctcagatgaccttgttggctcacctttgatgaacagcttaatcggtggttacagtacaggatgatatgcacagaaaatgaaagcatttgaaattcagccatatcttccaattaataggacattaagtaattaatcatgcagaggagggaaaaaggtcacggccactttgccgaatgaaacagtgtttagtcttcagagaggtgagagaaagcactcatgtatgttattcttttagtcatctctttttataatagatactatttttttcattttccttctgatattcctttaaagtgctgactgaatattccttgctcataaattggtgtaaaggagacatttagatttttcatgctaaaatgttatgatctttttattgtcacataaattagcaagcatgcttattttctttatgtactttaaaaacacaaacaaaaacaaaacaaacaaaaaaccccaaatgtttgggaactctataaaagctggctctccaaacctaacttgttattgaactgtgtgatacttggtgctattaactggcttctgtttattaactttttggactgaaagccaagagtgagagaaaaaaggatgaataaatagattagaatgaaagaagactgaagatagatagtagagaataataaaaaaaattgtttctattcatgaggagatacagtaccatcaatcattgcttaaaatgttctgtagcagttcctacttactacttactacacagttccacatactagtttggtcagattacaatgatgatgactgaaaggtctgccaaatagaataaaaaatagcatgcagaagaatgagtacttcataagacagttctagtgtccccaaatcatatgaaattatgaacacctacttaactcagtcatcaaagaaatgcatatttaaaacacagtgagaaactactgtacaatcagtggaaaaatgaaaattttaattccaagtgttggtaagaatgtagaataagtaaaaccctctaatactactgttggagcataaatctgtacaaccttgtgaccagcaaatccattcttgggtataagcccagcaggactgagtatgcatgttcaccaaaagacatgtgcaagaatgttgatagcatcagcattcataatagttccaagctaaaaacaacccaaatgtctgtcagcagtgcaatgtataaataaatggtggcatattcataaagtgaaatattgtactgcaaataaatgaaagaaccattgctttatacaataacatgaatgaatttcgcaaacacaatcttaagggagagaaaccagatgcaagagagtatgtattatatacatttatataaattatgtaagtttcagaaacaggcaaaactaatcaatgatattagaaatcagcatattatttacttgaaggagggtttgggtaatgatggttagtgcttgtcaggtggcatgaaggagtcttccagatgctggtgatgatattctatttcttaatctggatggcgttttacagtttgaggtgtgctgaaatctgtaaaaagtcattgagctgtgtgcaatgatgagttgtgtacttttctttatgtatctgatatgtcaatgtaaattgaaaaaaataaaaaccaatgcacacaaggctgggaaactaaaataataaataaaatgtcatggattagaacaaaagatataaaatagatatcctcaaatgggtccaaacttctagttttcttaccatactggattctctcctccctactaaataaatactgtgttcgctgatatctttgtgtgggccttgtattgttcttttccctctgctgaaatatttctttgtctgcttatccattcgttaatctcttacccatttttactgtgtcttctcacgttctacctgctttgagaagattttcctgactggcttgaaactctgtttcttctatcctcatatcagaagatgcggcccactgtactatgtactacttaaattgtagctatttttatagtatatttcttatatgtccttctgtccattagactataaggtccttatgaacagccgggcgtggtggctcacgcctgtaatcccagcactttggaagaccgaggcgggcggatcacgaggttaggagttcgagaccagcctgagcaacatggtgaaaccccgtctctactaaaaatagaaaaattagtcaggcatggtggcagctgcctgtaatcccagctactcaggaggctgaggaaggagaattgcttgaactgggaggcggaggttgcagtgagccgagatcaggccactgcactgcagcctgggtaacagagtgagactctgtcttaaaaaaaaaaaaaaaaaaaagtccttatgaacatagaccatatttttttgtgttttatttctcaaaaaaaattatttttcttagacaaaaatgtcaacttctgtaatgtaagttttaaaatatttttgtcaagaattaaacaagatgtttttcctcttgttagaaaattaattgaattcaaaaataccccatttaccaaacattatattgagttgagatttttatgtaattagacccttacataattattaagatttgaccttagtctttataaatattacctatctatattggatacacttaaatgttgttaattctatcaaaaaagtgttctcttttcatatttctttctttttgtttttgacttttgcttgtcaaattccgatcttctgtccctcaaaagtctattgtatatatattttcagaacccacagagaataagagctgttgcatagaactagaaatcattctttgatctcaaagacatgtgtgttcttgacattgtttgtcaatttttttatgcttatgacctcatgaaataaatttatttgaccattttactatatgttctctcctagatctgagagtagggattgtgactgacatctcaatacatttatctttgactgtaattataactgctttttatttttaacaggtttttgcaaaatagctaattgaattttagtttagagtctctagagaacttatttgatagtatttaaaattatgactgaattgtatcccaccttcagtctagtgttttcactgataataatgaaaataactgtacagagttctttatttaaaatgcacacactgtatatatagtaaaaaatgaaagccctttgttgttaaattactctgaagattgaagtaaggaaccattcctcctcccttataaaacttagtgaggtctgattcagtagtttaaggccatatgtctctaagtgtttttctgaggagccaccttgatggagccaggtggtatacagaaaggggtaggggtgagaatgtaggggattataaaacagataattccaggaccatttttcaattatttatttggagagatttggtgtgtttttttattcagtggggagcatgcatgggtcacatgattttgtacctggctttcttctgatactgtgatgaagtgaaaattaaataagacatgggtgtccataatttgatgcatacaataaaagttataggtaacatgatttcagctaagtttcctaagtaatgatatgagtctcttagttttataagagaagatttagtaataatttatttaatttagtaataatttattaaaataatattatatatgccatggaacacattttaatacatctgagaaaaaatttcaaggaagttatgttgacttaggctttctttctctctgggaacagtgatcagttactaaaagtagtggatcactttgactaatattttcatccccctattatagatgattaataaaaaagcatagttttttacaaagccataactgtcaaaaatctcacacagctgaattaacagaattatttgacagtgtatcttccagagacaaaacatggcagagattggtagaataaagttctgtgcatgtagtattggcaatgaatattagcttgcaatattatcgctagttttgtattacgagattgagaaaatcaggccaaaatgttggtttactttctttttgtcatctacttagcattgtctgttaacacaaccaaagagagtgtgtgtgaacatgtgcagttgtcctaaggggaactgagagatttggtggtagtggggagaggaagggcttaacatgaggccattaacgtagatgggaaaacctcaaaaagtactggatataggtgttagattctaaggagcgtgaaaacttcagatgtttaaagctggaaggttatgcgtcattcaatgattttcagatttttttttaagtaatagaattcttttttaaaaaataatattttctatcactttaatatttaaaatcaatgacaaggaatgaatggtcctggaacttatctgttttataatcccctacattctcaccatctacccctttctctataccaccctggctccatcaagatggcttctctgaaaaacacgtagagacatatggctccaaagggtagtttgaaaacaatgatgttgcagactcaagcacttttagaaaagcatctctgagatgaaagtacttactactattagctaccacttactggtcacttactgagttttactataccagggacatgacatgtatcttctaatcttcacaagagccttataaaattggtgatatttcggagataagtggagtgaatatcttaacagcatatctaccagagacaaaacatggcagagagtgatagaataattgtcacccagggacagaattggaacttaaatctgtctgtctaatataaaagttactcttgttccagtaccaccgtgcttcatcactgcagttgagttgacaaatttccttgacttgggcatgggcatttatttaaatccactatataatgagctatataatttatttgatttaatccagaatgatcttctactacttcatttaaaatacttctttccacaatttgaaagctttaaatgactgtttcttaccctttgtgggaaatggaatctgagactcactgttgtttggaattgctgccaagcttcaggattttctctatgatattctcatcccttggggagacgctttgcccttcctttgatttatgtgtatgttatttttagttatttgataaacacttgctgcgtgtctgtttaagcaaacctttagaaacacatatattatctgctgtctcattagagcatgtatggtaaaagaaaaaatcatggacgaaaggaatcagactaaagtctagggtttgaaaataattttaagtctttgtttgcagtgaggtattttaggatgagaattatgggcttatttcaatgtgctcttccaaaccatgttatcatctgtctattgatgcttttgccctctgcacagagaagatagtttgccacatttgagttgcttattaaaaacagtgggagttggaagcagtgcaaggtgagagagtgaaaggctgtaatggactacttgaagggtaagccacttaatgaaggctggtttttaatgtaaggactattaccctcgcagacataaatgcaacatgaaaaatgtctaaattacagtggacagaaatggcatgctgagactggaattttttcctgatatttcaggtacataatgcatctaagttagatatgtcctaatatatttcaggggaaaagaatagcctagtattaaaaaaaaggaaataaaaatgaatataggtgtcagtgctagagaacttccaacctcctagatgaattaagataggaacacacagcaatttcaaagactatatagtcacctttaacatataccttaaaatcaatacatagtccaaagactcaaaatttcttttccctggtaggagtgtgaccgaaaatacagttatgaccttatacttctcctctccaaaaataaacttgactcaagataggtaggtactatctcagtttaaaagcttattatctttcaaacacaagaagaatgccagggaaatacatacacacacacacacacacaaaacaaaaaaaaacaaaaaaaaacaaaaaaaaaccgagcaaacaagaaaaggtaggtaactaggaattattaaaaatatatatgatattaattatctcttataattaatgtgaaaaatatggagttatgattatatattagattatcattacatataaaagatgctttaaaatcttggaagaatgttagttttccaacctagtttctgccaagagtggtatgttgtaaagacctctactccctcaccaaagaggaaattattggctgagatgtatttttcaatgaaaagtgaacattttctaaatttagagcatatgacaacttagaaatgctcacagcatcatgaagtctccacctagccatgctgattaaaaagacgctggcttgctttttctaggtttatgagaataaaattaaataggacagttttacaaacttcatcaagctggttatgtatttctgtatgttcctcccacctcagttatttaagagttggagattaaataggaaagtagggtggcaattttgactattcaaaagttatgttttgagtgtgtaatttttatccatgttaggtcagacttactggatacttaaaaaataattctctgactccttctgtctgatcccaagcatttaaaatatgtcatttcacttaattctcccaaaatgcctttggaatatgtatttacatcattctgtaggtgaaggaactgaagtcaggtgaacctaagtaaattatcaaaggttttatgtcttgggaaaggcaaggctaggaatccaggtatatagagatataggataaggatttaacctttgaactttataaaacaagtatatgtagagatctttctttagagactgcagcaaaaagcttcagggctgacttggaggtgtggcagaagttgtatctcttatgctttttccagtgcaagtaatgggaagcacaactacaaatgtgtttaaaccataaggaaggctactttcacataacaaaaggtccagagttggctcattcagtggctcagtgatttcatcaataattcagattttttcttatgtctttgcctctccattcggtaggtcatctttttacctcaggctatctctctttaaaggtctaaaatctatggctattccaggtacaaaattcagacacaacagtatcctgaagaaaaagaggttcttagttgtctcctccttatgtcttataagtatcaataaataaacacaaaaaactttcctgggatactctttgatatagatatgttagcatagatctgtaagtagaatttcaaagctgtgggatttagaagaatgcacaaataaagcatttattaaaacagcattgtattctctaatgcaagcttgtctaacctgtgggccacatgctgcccaggatagctttgcatatggcccaacacaaatttgtaaactttcttcaaagattatgagattttttgcttttttttttttgtaagctcatcagctgtcgttagtgttagtgtattcttcttcttccagggtggcccaggcaagccaaaagattggatgcccctgctctaatgcgttattcagcctagcatcaggtttcccttaatttcatgcatttactgcatatgttacatatgcagtatcttcctacccctagtaagcttaccttatctttctaacctgccattgttactcactagaatttttcattctctcttgttttccttatgatttttatgatgtggaataaataagggaacatactttatttaaaaaaacctccaaaacgaagaaagagtcaagtgttatacactgtgtatgtgagtgtatgctaaagatagattaatttattattaggggaaccagcaggatagtaagactggttcaaaagattataggaataagggaaacatttataatcagtgaaagaaagaatggtggaataagattcctaaattttatactaaatgtccaataagacaatcaaagtgaaaccatgaggctatctttactaacagacaaatcattttcctctgtactagacaaaatttgtttgcattatcataatatgagtatcatttgtgttgctataaatgttctacaagttaagtcttttctcacagagttgtaaaatatcttaatcagtggtaattagtgactcagatgaagcgacatacttttaaataattagcgaatcctttggtgaaggatatacagtcattcttgtgctgggtcccaagttttgaacattttttcttaaaacttcccccttaggatcgtaaatattatccaaggatgattcttgtttaaaacaacaaaaaagtggtatccttttgtttttgtctgatttatttatttatttatttagacagagtctcgctgtgtcacccaggctggagtgcagtggtgcgatctcggctcactgcaaccttcgcctcctgggttcaaccgattctcctgcctcagccacctgagtagctgggattacaggcatgcaccaccatgcccagctaatttttgtatttttagtagagatggagtttcaccatgttggccaggctggtctcaaactcctgatcttatgtgatctgcctgccttggcctcccaaagtgctgggattacaggcatgagccactgcacccagcccgtttcctttagataggtgcagcaagaagtgtttattgacatgagccttgtagtaggagtgaaatatccagtgtcacgcaatattaaacaattagtaagagtggaaaattaacatctatttgaagatttcattagaaatctagaattgtgttttcagtagcctttattacttcagagtattttaaaaaacaaaacttggtttcttcttcttttcagaagcttaggaaccaactcaaaataaccatctccattaggagtatttcacttgaagttcttataaatgtgggtgaattccttcctcttttatgtcacccaaatgagctgagcttccttgcttgccagggattaactatttcctctcaggccgggaccctataaactcagactaggtaacagaccctgttactgggagggctctataggtatcgattgtttccacatatgaaatacacagcctttgtctctttggtgagcttatcatatgtgttttagtaaaaaagttcttcttaatcaaacaatttgtacacttgatttgtcaaactatattctggttaaagaaaaggccgattcttagttatttatccagttatctgccattgaaagtaaagaaaagtagaaaaaaaatctattactgaatatcttagatgtcagaagcacatatcaattaaagaacctttattaagtcaaggattaaaattaaatcaagataaataaaaagctttattattatatataccaatcaaaaaaacagaacattaaaagtatactgaaaatctcccaaacaaataatgccaaattgattcactgcatgagttcctttaagttatatttaactaattatttatctcttgaatttggggattatagtttatttcatgaagtcatcaatcctagaaactctggcttagtaacctggtatagtctggctgatgtctaggtgatatcagctctgaagcttgtacccttgaggctggtccttgaagacataacagttagatgtacctgatctttgactttctattgaggccagtatttgaagacttaatctgtggagcctatagttaatagcagagccttcaggcaagcatgggaggaatgcagaaaccacctgctgaatgactgaatgcttgtgattaatttattatagtaatcaaccgtatcacactagaaaagagaaaaattctccatcagggtataagacttactatttaataagtatttgttaacagctcctctgaaagtaagaatatatggacatgactgtattaacagcttgccatgttcttcccataaattgaattattttggacacattttatattacctgaaaaaaattaatgcacagaaagttgaactaatctgatttgaagctctttttcatgcaagccttataatggtgttgagctaattaaaaaatatggaacataccaaacaaatttaattatttttattgttcctaatcttacaaggcaaggaagtgaatccctgcggttgtccaaagacctataggaaatcacaaaggcagattagaagaaaagacctcttgaaatttttattttttctgaatttgttgttttatcatgcaaggaagaatcagaagtgttatcacaggagattggtcacttgattaagacaggtgcctaaaaataaggaataataccagtattttaaaattattaatattaatatttataatattaattatattaatatagtaattttgatatttaaaaataaaatagaagataacacaatgataaggaaactcagctcttccaagaaataaagttgtatttgtttttaatcatcaaaaccataataaaataaacttaatatgtataatactatcctggagagatacccaatcattcctcagattaaacagaaattaggaataatttttgtaacctctttttaagaggagactgaaaatactaagatcaatttgttattttaacagagataaaacctaattccagtctggcattaatataatatttgacagcaaaagctttaaaaaaaaaataaaaattttttctggtcaccaaataatttatttcacgattgccttgtattcaatgtatttctttaaattcattatgttctgcacacattccatttgtagttactctaaacttttcaaaatatctgtactattctgatgttttactaactgttgtatttgaatgtaactcacaacaaactctttccactggtggttttatttacatcaagcttgtccaacccatggcccaccagccacatgtggcctaggatagctttgaatgtggcctaacaccagtatggcctagggaagccaaaagattggacacccctgatttacatattatattgagtttttgagtcataagtaaaaatactttctcaggaaaaaaaaaatagaaatattgtccaaaaatctttgtattgcgagatatctctattaagttatatgttgagaaatatctccattaaatttggtttttaaaccaagaaaagttttctattgataaaaatatggacaaggccaacattttgtggactatcgtgcgtgtggaacatatctatgagaagtcccccttcaaccagttgtcaaagtgagtcttgaatgagaaggaatatttattaggaagggaaaagttaatttgaaattgtatttttgatgtaattgttggtaatgagcaagcctaaaaggataggaatttatttcctaaagtagcagctaaagtaacaaaaaaattatccttctctgaaaagtttaagaaataaattcaataatagctgtataaagcatttgggtatttaatttttctcatgtttctagtatattgctttactttatatgggactaagaaataatttaacttaatgttttatagaaaataaaaatgtgtttaaactgtcaaaatattttttctgaatgtaatctactaatgattttgacttattacttttgtggctataatgatagttaaaacaatgttaaagatatgctattgttcataaaaccacactgttcttgacaatagaattaagaaattgatacttaagaataaggtgaaacaataccaccgttcagtgttgtgcagtttagcactgtgtttggcacatagacctatgataaataactgttttatgaatagctcaaaagcttaaaaatagaaacatgattttctcaactttcttctggaacacataagtatgttggaactcaaattatttttgaatgaatacataaatggaatgataaatttacacaaaggaaaaaggggaatattttagaaaatgatttgaatttaactgttgttaatgcactatactattgcaaaatggccttttgaagctttttaacgtagatgaatgaataggatggatctggtcaagaggattgtctgagtgggtttaattccagccccgtataacactataataatattctactgatggtgtttatgtttttttttctgcatgttacatgaaatctttggaagtttagatctttgccccagtattggaagattatatttttcatgttacgtcttatagttaaactttgctattaaggatgctattgtgacaagaacatgttgctttatgtaataagcactgatttcgattttttaaactggattattcaggtattttcattgccactggaaccaagaaacagactcttcttagcttagcagtggtgactatttcttctgttctctttgactcaaaattgaagtcaatgaagaaaagccagtgggaagagctgattgttgccatatgtcacattccttatgataaagtctaagtttctccctagtaataaaatttatataagccctttaaaaaataggatgacatttatgttagtttcttattttcgcaggctgagcagttcttttactgaaccagtagcagtggtacaaaagttgttttgaaatttcaaatgctctacatctatgtttaggaagtggacacctataggtcccaagaaatcattagagtggaagaaataaagagaaatggatggtcaataaaaacaatttataatttttggctgggtgtggtggctaacacctgtaattccagcactttgggaggctgaggctggaggatcacttgaggctaggagttcgagaccagcctggccaacatagtaaaaccccgtctctactaaaaatacaaacaaaaccaaaaacaacaaacaaacaaacaaaaaattagccaggcatggtggtgcgtgcctgtaatcccagctacttgggaggctgaggcaggagtatctcttgaacccgggaggcagagattgcagttagccgagatcacaccactgcactccagcctgggtgacagagtgagactctattaaaaaaaaaaaaaaaaagaattttcatataggttttctttatgctgcttttaaatatttattgtccatttttaaatggacacatgattacatatagttgaaaagatagtattctataatagaagtcatagttctttgtgctcaattttcctagtatttttacacacagaatctccaaactcagcatatcatataaaccattttggtactagcaccattataatactttcaacattattgaaattgatttttttccttttttttttttttttttttgagatagggtattgctctgttgcccaggcttgagtgcagtgtcacagtcatggcagtcctcccacctcagccttcctagcaagtgggactacaggtgtgtgccaccacacctggctaattcttgtatttttttgtagagatggggttttgccatgttgcccaagctggtctcaaactcctgggctcaagtgatccacctcagccttccaaagttctgggattacaggcatgagccaccatgcctggcctgaaattaatttctgttaaatctgaaagagactctatagattatctctagtctaaacttccgttttacaaataaagaatagtgtagaaataggcaaactgacacaggaacctgagtaacctgaatttaaatctaggttttattgcttgagatttggtcatgacatacaacctttcttagcttccattttcccatcagtaaattaggaataataacatttctctctctctctgtaaatgttgttgtaccagtgaaatgaaatacagagtgcagtatctggtagtatctgggatgtagctgatggtgaatgaataatatttgcctccttccctctggcccaaggtgacacggccggttagtaatctcattaatctataagaaattggtttgaatttctttcacttactttttttttaaaagcaaggaataaattgcactttctcatcacaatatttcagtagctcattaggaattattttatatccaattctgaaaatcacctttgttatataattgctcactgagtacagttgctttgcactctgacgcataatgatatctagaaatgatttttataacaaagatagaataatgaggtatggaaatagtttgggaaaaggtttattatttctcaagtcttaagactgtttttatgtagttattccatgtgggttattgaattgctttgtggtcattctaattaaaaaattttctaatgaaatacacccttttactttgaattttacttaatgttgacagcagctgcagtctataatgtcataaggccaaggaagaagttatgcaacaacatttaaagctgagacactggaaaaattgttaaaagtatctcacactgcaaaaacacaagcaagcaccagcaaatatctagatttgaaaaaaaatgggtttaaaactgtctgatagagtttattgtcatatatttaaaaatctggatattctgttgcacaaacagattttggttttatggcttacagtagaacttgtaagatacttacttggattctacatatttgagtaattttttaacctgttttcagatgtttgggctgtgcccagattgttagctacgaattcttgttctaaaatgagaaatctgataggttggctgtcttacctgtgccttggttacgtctgttgaagaatgagagaaggataaattctctctgctctttgtaggtcccttttacatactatgataattaatgtattttcagttactttgtatgtcaaatgcagattcctttaaacctgcagctccatggatgtgtttacggggtttataaaccctttaaaagtgtaatattgcatacacacacacacacacacacacgtgtgtgtgtgtgtgtatgtctgtgtgtaggaaggtgtgtgattttccaagaatgtattagacacagaatatcagaataatcacgcagaatagtagcagaattctatagagtacaacattgaacaggtctctaaggcacagcccttggggaaggttgcgtttataaggggaaacaaaactcccactttgctcatctccaagtctggtatcttgtgctgatgcaatcaaagttgatacttttttctacagagtctcctttgcacccttttaattttattttcatcctttcaaggagagttagctatatccagaatttaaaggatgtaaaattctttattctcaaagaattattgtgtgaatttttttctctcctgaggctaatatctgtaggttttttctgttattgatgaacacatcttttttatgtcccttttgctatactattgagatgaaagcccgtttgctagggtttacatccaggctgagcagggtttggaaaatccccttcatcctttttcttccatatacttaacctattgtccatgggaatgcttagataaattactttgagcattgtgtttttcatttcttgcaacttaatgttgattattacaattaaagacataagtaaaaacaaaccaacaagcacacaaatattattaaacaacaaaatattagatagcaaatattatgaaataacaaaataaacagacagtttgccatccattcctaaagtgaatgccctggaaggtcaaggctttttccctctgtctagccaactagtgttagaaaggaacatgtgacttaccaaatgtttcataagagtctgagaatatctacagctgtaaaggatttgctgtttttggaaatataaaaaattgttccttttcttcaataccttatgaagtaaaagaaagcaactgaggcatttctgccaaagaacttcttatcttggaagactgaggctctggactctagcacttacaccacatgacatggacagattgtcctctctttcttaaaggtaaaatcaagactttcctatttgtccttcttttcccagaaagtagttgtaagaaccaaaataatacatgattgtgaacatactttgaaaacagttgaagtatgtttttataatctcacgaagtaacaagtgtattgtgttggtaatgtaaatggattgatacttggatctttaattattccatgtcattttactagtcaatatctcaaagaatgagactcaatcacatggttcatggcagtgcatcatatagcatttattcgattcatggtattttatcccatgactctaggtagtaatggcagagtacagagatagagagagtagaaaggaagaaccagtaaactggagtatgttcaaataaagtagctgaacttggagtcaccagtttccaaaaagaacagggagtagaacatttagtcagaaactagacagactagtagaaagatatcaggaagatgaggcaagtggcaaataatcaggtactatattatattctttctttcttaatagtgccttgaatagtactttactgtgatagacattcaataattaaaatagcttcttaaagtttaatctctaaggtcattttaacaatagcaagtaactcattactttcctctgttattttcaatcttacttgaactttgcatagggtaagaattatattggagtggagataaaactagaagatatttatgcataggtgaaaacagcatttataagaagaaaatagatgaaagcaggaagtgacaaaattctgctctgtaaaatttctccaaaagtgagatacgtatatattttcagttatatggcatatttcacatagtattctttggacttctttgaacgattatgcatatacattagcagtaattattttagaatctaatttttatagtcagattcctgaaaggtatttttctcaagacttttctttatttgtattttcagtggaaatttttttcatgcttattttcttattttaacatttgtacatgtatatgaatgaaacaaaaatggttagaaaacatggaaattatacataagtctcataaccaagagaaaatcaccatcaatcttttgatgtcattttttgttacctctaagtctatgtttgtgtgcattgttgtttgtatgtacatctctgtgtgtgtctgtgtatatttacttatgaaatcatgaccagatagcatgtacattttttgttttgctttcaaaattaatgctgcatcaaacatccgaaaattctgttatttataattgttatctttgggaagattggttcaataggaactactcagttttgtccagaagcaaggcctaacttatgttttacttaattatatttgttttctagttcataaatgtaataatttcttaattacatatagagatgaaagtaacttatggtttatatttattgaaatataactttcaccttaatatttgtggttaaattcaatctatttttgtgaagatttgtgaaacacagtctaaaaagcaaaccatgatcacagattacttctgaaatataattcttgactatattggagttaagcagagcaaagaaacatgtgctctttttcaacagtaagaaagaaagaattctaatgtgtttaaaattcagcctaatttatatgcttgtaacagtttggaagttgattaaagtctgtagagtaagtgaaaattacatgtagttctcattttagttgaccttccatgttaattaggacattttttttttccatttattttgtagttaagaacattttctttatctagtaaactttgattctgggttttttttcttttttttttgttggttgcttcttgctttaatgaagttgatcactttcatatcccttttaacttttctcaagatgctgaatatgattttgaaatacaaatcaaagtactatgatgaagaaaatttaggcagttccagttgtctattacttacaagtcagtcatatattcatttaacaaatatatatttaatggtacatgatatggtttggctctgtgtccccaccaaaatctcatcttgtagctcccataattttcatgtgttgtgggaggggcctggtgggagatgactgaatcaagggagtaggtctttcccatgctattctcgtgttagtgaatgggtcttacgagatctgatggttttaaaaaagagagagtttccctgcataagttctctttgcctgctgccatccatgtaagatgtgatttgctcctccttgccttccaccatgattgtgaggcctccccagctacatggaactgtaagtccattaaaccctttttcctgcataaattacccaacgtcaggtacgttacatctttatcagcagtgtgaaaatggactaatacagtaaattggtaccaggagtgaggtgctgtgaaaagatacccaaaaatatggaaatgatttggaactgggtaacaggcagaggttagaacagtttagagggatcagaagaagacaggaaaatatgggaaagtgtggaactccctagagacctgttgacttgggctttgacatttggctttgaccaaaatgctgataatgatatcgacaatgaaatccagactgaagtggtctcagatggagatgaggaacttgttgggaaccggagcaaaggtgactcttgttacgtattagcaaaagattggtggcattatgcccctgccctagagatttgtggaagtttgaacttgagagaggtgatttaggttatctggtgaaagaaatttctgagcagcaaagcattcaagagtgacttgggtgctgttaaaggtgttcagttttaaaagggaaacatagcataaaagtctggaaaatttgcagcctgacaatgtgatagaaaagaaaatctcattttctgagtagaaattcaagcctgctgcagaaatttgcataagtaatgaggagccgaatgttaatcaccaagacaatggggaaaatgtctcaggatatgttagatgtcttcacaacagcccctcccatcacaggctcagagggctaggagaaaaagatggttttgtgagtcggacccaaggcttccctgctctgtgcagcctagggacctggtaccctgtgtttcagtcatgccagccatggctgaaaggtagctctggctgttgccttacagggtggaaaccccaaaccttggcatcttccacatggtgttgagcctgcaggtacatgaaagtcaagagttaaagtttgggaacctccagttagatttcagaggctgtatggaaatgcctggatatccaggaagaagtttgctgaaggggtggggccctcatggagaacttctgctagggaagtgtggaagggaaatgtggggttgatgcccccacaatgagtaccttactggggcaccacctagtggagcagtgagaagagggccactgtccttcagacaccagaatagtagatccactgacagcttgcattgtgtgcctggaaaagccacagacactcaatgccaacccatgaaagcagacaggagaggggctatagcatgtaaagccacagaggtggaactgcccaagaccatgggaacccatctcttgcatcaacatgaactggatgtgagacatggattcaaaggagctcattttggaatttaagatttgactgccctgctggattttggactttcatgggtcctgtagtccctttgttttggccaatttctcctatttggaagggctgtatttacccaatgcctgtactcccattgtatctggaaagtaactaacttgcttttgattttacaggctcacagatggaaggaactttccttgtctcagatgagactttggactgtggacttttgagttaatgctgaaatgagctgagactttgggggactatttgggaagcatggttggcttggaatatgaagttatgagatttcggaggggccggggatggaatgttatgatctggctgtgtccccaccaaaatctcatcttgtagctcccataattcccatgtgttgtgggagggacccagtgggagatgattgaatcatagggcaggtctttcccatgctattctcgtgataatgaatgggtctcatgagatctgatgtttttttttttaaaaaggttgtttccctgcacaagctctctttgcctgctgccatccatgtaagacataacttgctcctccttgccttctgccattattatgaggcctccctagccacgtggaactgtatgtccattgaaccccttttcctgcataatttacccagcctcaggtatgtctttatcagcagcatgaaaacaaacttatacagtttgtgtgccaggtattcttccaggcacttgggctaaatccgtgaacaaaatagacaaaattctttgccccagagaagcttataccttgatggggaaaaggataataataataataataataataataataataataataataataatgcagtgtttctaagtaccatggagaaaattaaagacctaaaagatgtggaggagtatccatgcagttatctaggggaaaagcattccaggcatagggatcagcaagtggaaagtccttgaactaggagcatgcctggcatttgaggaagaataagatgaccaatttggtttaaagaaaagagtggaaggcattgttataggagataaagtcagagtagtaataggggactgattgtatatggctattatcagtacttcacaaagttctaaatggagtgacatgattttatcttgacagggtcatactgagtgcgggatgtggagagtagacattgggatgggacaagggtggaatcagggaaactagctattaggcagttgtgataatccaagtcagagaagattataacttggggccaggatataatcagagatggttattaaatattagggtaaattgaatttgctgacggattggatttctggtgtgagagaaagataggagtcatggatgagtgaatattgttttagcctgagcactgggaaggacacaatagtcatgagctgagatggggatgaatgtgagaggggcagatgtttgggaagaatgggagttaggttttagagatgttaagtttgaaatacttaatcgatatgcatgtctgattatcaggggagaggactatgctggggatacacactttggagtctttattgtatagatggtctttgaaaccatgagactggatgaaatcacaatggtataggtacgaatagagagcagaagagttgcaaggaccgacacatgcattactccagtgtttagagttcaaagatttagagaaatgtacaaaggaaactaagcagtagtggactgtgccatcagaggaatatgcactatattgagaaatatatcaataaattctgagaatgattcaggtgaacttagggtagaatgattaaacgtctgtttacctttctgtctttatccatgaaagaaggaaaataaataacaaacaaggtgtgagattaatattaaaatgtgtactggaaaggtactggaaaatcagaggatgggggctacatctgtatttctgaagcctttttaccctttcttgttttatgtagtaagaaatggaatacaattaattgtaacataagataaaatataatcaaatattaatagaaacaattttgttgctcaagagaatgataactactgctagtactgagactaaagggtattcatgggcaggcaaagatttgtgtcataaacagaaatttggagtgatcactaccacaatggtgaatgaaagatggagaagcctgcattctagaccactgtgcataggtgcatattgatcgcatagttacctttagcactttgtaatgttatctgttagtattagcataatgaaaaatcagaatactaggcctagaagaaaagataatttcaagcaacatcgaggcaatgttgtaagacagttatgaaacactggttctcgaagctggctgcattttagaaaaaccagacattctttataaaggattaatgccacacccccagaaacttctgtatatttggtttgagttaggactagtatttaaagtcccataggtgattttaatatacaactaatgataaacatcaatgtaatggaagccaaggcattgtgtgtgaggatgtgcgtgttttgtgtctaccatttgtagcactttgtgttgcaataggttatcctgattttgtttgtagattattgcatatgcatctgtgcctaattgatatctgtgtgctgcacatcaaaatgtgaactaacgcagctttgcaaagagtcaagtccaaggactaagccttgcaactttatttaaatagtatatagaaaaattctaaaaagaatatgtgaccactaggaataattctaattggttggttagcagttttagcacaatgtctttgataggcccttacatttgccacatagactttgtgcttttactgggaaatgctaactaaaaaaatacattggaatgtttccagtcctaggtcaccatttttttttttttttaaaattacctccctcattagttcccagcattacagtgtatggtacattcacatatacacacacatactcatgtatatcagagtactcagttctgttcatttcctcattccatttttcttttcaaaatttggcaggctatagtgaaaaaactcaggacactgacttaccagaaatgtgtttgtgatgtgctgaaaagttagacacttttctgagagccaggtaggggtcttctccatgtactatggagtagccatttataccagtcattcatgcctgtcagagtatcatgtgtgggcacttaaaatacaacataatgaaaatcaactctccttattatcattatctgtcctcagtaacctaaaatcaagtattaataggaaagaccaactacaggtatagaccttatttacccttaggtttctggcctgcttttcaactctttggaaattctctttgaggattaaatgaacaatgtatacaatgtgcctaatgtacctctgtcactttatctttggttttcctgatacattgaatgttggaataaactgaatcctgatttttgacttgattcttttgttcctgagtgttcttgtggtgaacatgattttaattaccacacccaaagcgttaaaaaaatcatttcctttctacagattctccctgaattctactttttcacttctaatttatttttatcaccatttcctggtattcttttgccatgcttttgaagtccattcctttgttatgctataggcaactgctagcagacctatttctgaaaaactctatttgacaatttaaaataaaagtcttatagtcagaacttggaaacagaacgagaagttggggctagagctaggggaatcactaagttgatgtgagagaaaaagcactaactggaaaggaccaaaataatggacacatataggtcaactaggcaaatgtcatttcatgcagttgtgtgcctcggaggtcctaatctctaaccagtttttcttgtactaaaatgccattgaatttatagcttaagcagagtaattaaaaagctgagaaattggtgatgaagaatgaaatctggaatggcttctctctctctctccttttttttttttttgagacaaggtcttactctgtcaccagggctggggtgcagtggcacgatctcggatcactgcagcctcgacctcccaggtttaagcaatcttcctgcctccccttcccccagtagctggaactacaggtgtgcatcatggtgcctggctgcatttggccttgctttcttgagattattgcatttatttgtttttcagaaaagataaagatggtgattggttgggtgagttagtagttagggttctttcagtatcttagagttgactccacaaccacagttggaaggaaggaggctctttaaccaaagtatgaactactgttgaaatatgctgatgaagtgtgagaatgacagcagcagattgtaatggattttgaagtgttccaggttttaatagtaactaatagtagaactatagttcaaatctgtaatgacaacattgaaactgtagtcaaaatactaaatctagattgcattaaacctttttatgagaatacgtaaaattatcatatgctaacaagctatcaatctgagttagaaatgcttggcaataaaagtgttgtttcatttgattgatattgaagtagccgtttgttttatactaacttcacattatggtacagatagagtccaaactgatgaaacagatgtaactaataaaatgaatcgacagtataataattgtaaagggaaataatcgaagacaaagaaagtgttttttgagtttttttgctgattgggtggtgagagtggaagagcgtgggaaagcgtggtataattcatagacaaatcctagtatttctctgtattcagtttcatttcactgagttgtctgattgtaattgagttgttcatattgttctcttgaaatgttttgaggcaaatgaaatcttctaagaattcaagtatagtgaaacaatagccacaagacatggtaaacttattgctgatgttaacaaaggacaaaaagggaaaacatgatttgtatttagtagtgttggtgctattgcttggaaccaaatatttaaaattatttgcaaggcaaatagatttgactttaatgatgaattttggtaataaatcatgaagggaatcttttaatctttgaagtaataagctaagcgtgcttttttgtgagatgaattgactttaaaaatagtaataacaaaagtctaaaacatatttacaaatgatgatttttgataggacttttatataaaaatttgaactatcatgtgataatcctgaatttaaaacctaacagttttactggtagaaattttttatgagaaaagtaatgctcatttaagtagattttaaagtaaaaaaagctaagatgatatgatgaattatcttgatgttaaaaaggcactgcttcatgaataatattactatgaaaaaatatttgagaccctaaaggcctataaaggagaaatattttatttaggaaatgaaaaaatgtatatcaggggcaatagcttaggggaccctgagttctattccctattttactgtttattctgtagctgtgagcaactaatttaaccttccaaaatcttttcctcatttgagtaaggaatgactaatactttccagctacatcaataacagggatgccctggtggatgatgatgtttgtaatttagtacattaagctctgtgggtggaagacaagtactacaatatgcacaagctattatcgtcgaaccactttttgttttaatacttattttaaaaatatttattttgattctgttatgtgcaagggaacaaatgatatgtcctttctgtaaactctaagcctctgaaatgcagctttcatttcttgctcattattgtatcctgtccattcaagctttgcttttaatcttctacatggtaaaaaattaacaaatgtttatttagaccataaatattttgaatggtttcaagttttgaatggtttcaaagtttgaatgtttttttttctcttacaagactgtctgctttagaagaaaggaacttctgtttgctactatcctcttacctcccatcattggaacaaagtgctcagttctggaatagatttcctcactagcatagctataaaatattcttcagaaacatggcatccacgtctttgtggcatatgccataagagcatttactaaaatatgagagaaaggttaaaaattaaatgaatttctaaagctttttaaaaaattgctaaactttcataatctattcagcttctcaatacatgtgagtttggaagacagtaatttctataaatttattaacatttaacctactaaatataattctttgaacatggaatacagctaaatttctttaaatattcttttgtatgtcaagaatttaagaataaagaatagtcagttttcacatgcagtattttgtttaccaggtagaagcctaacttaaactcctatttatcagaccaggatctgatatattttgaatgtcttataaaatatctatattgttcttgtaaaatgtctatctatattgttcttatatctgaggttttacctggggttccctgcctttaaacgttatttacatatggaatattttcatttttctcttcaaagttaaactgtactttggaaaagagctcactctctataatcattactgcacttctcaaaactgccaccttttcttcaggaatatagaagtgggaaatgattctgtaaaatttcaaggaaagagtggtgggacagtaatggggaaatatcagtgtataaatgtactttcaggataacctctttcccttggtaaaatgtgtaatatatcttttaaaggcaggaaacttgacttgtgaagtgatggtagaatttaaactgcatgcaaagccaaggctctttaaaagaacgtgaattaagtcaactatgtagtttagctcttgggtgatttttttgttgttattgctgtgtgtgtgtttttttgtttgtttgtttgttttttgttttgttttgtttttttaaatagagtgaagagttttattcttctatagcctctgaataatggaaagacttcctggtgcctgaattttaaagaccattattgtagtctataattgtattgtactttggaactagagagtactgtagaaacctagtccaaatgccttactttacagacatggaaacttagttgcagagaagtagcagtacttgcttggtgaagagcacgtagctacttggagttaaggtgacaattgtcatggctcacccctcactctaggttttgtggtcctaaagagttaaaggaaaataatttctgactcagatactcctcattccagttagtagcaatcttgagttagtagcatttattttgtgttaaaaataaattggaagtgagttgacaggaatgataaagtttcattgggggaaaattaggattattcaaaggaagctccaactagtcagaggaagcaaccagtaaaagcaggatcttggtcattggcctcgtcacagatttgtctgcactttgacgttttttttttttcttttttaacagaacagtttattgttaatacatctctccttttattggaattcctcttacatgaatggattttgttttgtttgtttaaatagagtaagtgttgatcatggctctatccctttcttttcatcttagttcctccttcagtttatattctctgctctctgtcaccctaaatttattcattaaatttagtctctgctttctgttgtccctgtgtgtgagcctttgcttttcatgtctatatttcagtgaaattgggacctgttaattttctgacacctgtagatttaaatccagtgacttacaaaacaaactcagcaattttggaatgagaggacatctgtgcattttgcattattttttattgtgaacatgggaaggttatgtatgcacattagagagtcaaatttcaaaaattaagtactggatttgcttcatttaattgctttataaaattgaactaacattgtaaatcattaaagtgagaatattttttcccgaaggctctctcaaactctcaagtaggacattactttgtaatttttatagtagttaatggtttccatttcagtattgctattatgtgctaagaaacctgtgtttgatgtagggacctagtattaatgaggcccaagttagtggtttgatttatatatgaaataatttagaaggagaaatgctctctatcaccatacttaatattatcttttattgtagtattggccttgtgccaacacttgattcggagattagtcaaaggtcagaggtgatcatacttgacggtttagattcttttggaagctaagaaagcaaactgtgccaggcccgccctgagaccacttaaatttaagtgagggccagggtattggtgtttttaaaagtgctgcaagttatgtcaggttggataatattggatacattaggttaagtcactgaatttgtcgatagttggctttgagccttctactactttgggcccaagtgggtattctaatggctggttttacatactccttggattctagaatcctgtgatattggaaatctctctttaagtaaatgctgacaaactggttagaattaaatggggagggtttgggatggagtcctggataattcagcgtcgccaattgtcagtgttggaaaaccagcatgcagaatatagtagaactgcatttaaattaaccatacatcaacagatatttattaagggcctaccatataccaggcatggggttagaaaagtcaacagagtagtagattattcttcgcttatggagtttacatccttaaagaaggtggcacatagagaccaaggtactataatatagtaggtccaacccagctagcttccctgcagtgctggggctgctgagcatcaaacgagaagtttgcttggtgttgggagcctgtttctatgaagatatctatcttctaacgctggagtcatcctctgaatccaaagaagctaatactgtgagaggtaggagggaagtaacatgatgaagggaatagcagatctgtgtttgcaatctgacttgcatgctcattaagtctaaaagcaggcaaactgtcaccatgattttaattcactctcttttatgtttcatgaacccacacagttggttttatatatgttcaatgcacacttgacatgcctccacatcctcattgtgtgttattaatactgtaaatatgtaaggcattgttgtcacagtctctgggatcatagacttgattgatttctcaactctgtatcccgaggtggataagttaccttaaacttaagagtttatttactcagccataaaaatggatactgtgatatccactttgtagtagtcttttgcatgtctgagatgtgtaacccctttagtccagtacttggtacaaatagatgcttagtaaatggagatgtttttgttagtataagaagagccacaatttttatttaatacttaaaattgagaaataggaaaattattaaaactttaacatacaacaacagaagagatgtgaaacatatttatgtacattctttcatttagagtttaaaggttttaattacatctgttgtattagttgaaactttcttgaataactacagtgtttttccgtaagtgatccaagttttctattttgctcttttccaaaagtatcatctaacacctgcattttagtacctaaggagctagttagagtggcatagtactcccaaaagtgtctaaggctcgcttcatttttgtgcttaccttgagcttctttgtgtgaccctttactgacaagttttcctaatggtaagggctagttcatcaggaatattctatggaaaggcttatctgtcttctactaaaatagttcattccctgtgactgatctgaacttagaggaaatctggctcagttgtcacctaatgtttgcagaaagattcagagattaataaaacatgagtctgtgttgcttgagactgtgtcacaagtattagatccatagcacttctgggagcatttaataagaatagtcaagaataccttagcatttggatatcaaacctgattaggttttaaaccagtcttatcaggttttccttgttactgatttaacttaaacattgcataagatcattggcttggaagccattcaactctccagccaggagaggtacctgttctctgtgttctaaaagtacaaagacaaggctgatattgataacaaattacgtaacaaactcataaatacagctcaaaatgctatcattagctgaagctatgcacaccatggctggtgggcatttacgattgaggaacttatagcatgttagtatgaatggtcacttgactagaaaaagtaataccacctccacttcatatcaattataaaagacttcagaaggcattttataatctaagtttttattctctggaagtatttttattttaccacttcatttcttttcagttaaatattacctcagcctttctttctcttatctctattcaaatgatatcaaatctcaaatgacatttcaggcacttaaactttaaactcagaaatgacttttaaactgaccaaatgactttgattgtttgtgtctataaagatatgcataagattgctaggaaaattgaatatacagacagtacccctaacaaaagcctgaatttggcctatgatgtttacaagtttacaagtgtttattcacatctactttgtgttgtatattgtgctagattctgtaggacactacagacttccaagaaatcagaagaggttgaatcacagtgctcattagacattctttgccattttcaaaatatatctattcagatatatgcagatacagtctacgttacaaacctattcttaaatttaccatgaataatacagaaacatagcttatcaaactcataccataactgggaaaagatgaagtcatcgactctattacagcactgtttatagcagcactgtttaataagctcagatttagatagacaagatgacaggaaaaggaaagttttaaaaacttggttcacaatattaaagacttcatgggcgtttgggttaccctaataggaaaaccagtgtgcaggagaaaggttgtgactattcattactatatttttcttaaaaatgtacaagtttaggctgtgtttatatatgtgaaatcataggtgagattaataattatccatatactttaaaatacccaataattgctgcttaggaggaggttatttatttatttatctgtctgtttaatttgtttggaagatgtcaatcatcattactgttaatgaagcttacttaacaatgccttattaaggcctctgctttcctttgtaaatgttaccaaaagcttagcaagacttgggagatattcatgacaataaactgaaatgtttgcattcaggtttcaaatcaattatatgtttctaagtatgtttttatatgtaaaaagtattcagtaaatgtaatgcaaacttctgtaactaactggcaagtttaggtagggataatatgtcccccataatacgacaagataaaaaaaattgtttgaatgccgtttgcttttaagaaatatattaagatttgaaacttaaagttgagaatgtataagaaaaattatgccttgaagaaactcatcatgactcagaatcacaattttgttagaattttgttatatatcacagggataaaaaaaagttttcatgttgggtaattttataaaaattgaatgataaaatttgagtatggtctattttttttgataaatggctatgtaatatagagttttaataataacacccaaaagttcaggttcaggttttggctctgctaattactaactcttatagttttggttctctcatctataaaaaaatgagacagttaaatatctattccttctacttttgaagtgtagcatcgactgatatggtaactaactaactgtgaatgtacgtatagaaatgccatttggaagggcgtcttctgtcaaaagcaacaagtaaaaagagagtgctataaatctaaagtctgggcctggaagtaaagacagaaaattctccaaatagatttacaaaggaagaccttcctttttgatgggtttaaaaaactatttgagttgttttgagaatatttttacttagctatgatttggttagtcattaggggtaaacctagtagatagaaatgagtgttcagcaaactgattcccagatgaaagagaaatgatgtttatgtctgtttccagtgagactgcagtttatgagccaagacatgggggtgtgaaggaggtttccagacatgcaataggaatggaggcaggtactgttttatcaagtagtttagaacagaccattgatatgaccaactctttgattttgaaaggtattcaagtcaacttagattgtattgtagttcctaattagccatggcattcagggacaatggcaatttatttattatttatgttatgtgcatagcaagtcattggggggatttgtactgtgtagtcacccacaaactcatgctgactgaggctctacattttgtggttgcaccatttgggacacagaactttatcttagtggcaagaaaagacagtgactggagaaccttcatgggtgttccgaagccttatttaggaagtaacacatgtcacagctcattagtcacaagtgacattataccatctaacggcaagcaggatgagaaatgtgggcagcagacaagtgcttgatgtgcatcttcatgtgtaacacaaaataaatgttgcagaagagggtttcctacctcattctaccattttaagtttatagagttaaggtaattaaagcaaatatgacttacattactgaattcccagtgattctttttcttcctaccgtggcttctctgttttggcagaacttcagttcatgaggacctatttcataatagtcaaaaatacatcaaattctaatttatactgtgtcattggcacatagacatctctcttttggggaaagtatttgtaccgggctttctttgttgagaaaatttacacatatttatatttatattctgtaattttttctctttggaattttgttattaaaggtgatctatgcctccattcaccaatgctattttattttatatgagcccttttcaaattttaatctaacaattaaatttcatttcagcaaactggaaattcaggggtccccatctgtctttttaaaggtgaaaactaggatttcttttgtgcttgagcaaaaagctggacagccaataattctcttatttgttggtgaatgaggaatcaaaggttacatttataaatcactttaagagcataatttagatccttgttttgaaatcctctatagaatagtatatatgtaaaatgatcttattatgtctgtgtgcccatcataggtttaaagacaagttgagtacacaaattgatgtaatttggatatatatccctgccaaacctcatgttgaattgcaatcccagtcttggtgatgggggccaggtgggaggtgattgttcatggagacagatctctcatgaagggtttaatacaattcccttggtgctgtcctcacaattgtaagagagtttaaaaatatgtagcactttcctccttcctcccttgctcccactttcaccgtgtaaaatgcccgcttcccctttattttctgccatgagtaaaagctctctgaggcctcaccagaagcccagcagacatgctcagcaccatgcttccggtaatgcttgcagaactgtgaaccagttaaaccccttttctttaaaaattacccagattcaggtatttctttatagtaattgcaagaatggcctaacatataaagtgtccccttttgtgctctaagatacgaaagataaatttatattagcgcaaatctggtttgtatcatactctgttaacttgttgaggtagtatatgattgggtgagaataagctggaaactatggaatgtgctatttgcacaacatttgattgacaaaaatgcctttatttagatgaactaaagaactttttattatttaaatgtagtcatttgccacataatgatgttttggtcaatgatagactgcgtatatacaatctgataagattatactactatatttttatagtaccttttctatttttagatatatttagatataaaaataccattgtgatgcagctgcctacagtattcagtacagcaccatgctgtacaggtttatattgtaggagcaatagactatatcatatgtaatagactatatctattgtataggtttgtgtgagtaacactcaatgatgcttatgtaattaacaccctatgatgtttgcacaactacagtgacattcttagaagctatcctcatcattaggcaactcatgacatatatgcatttatttgtattaactgaaatttatacattttataatttaaaggatcatccagtgtgctcgcatagaatcacacctgtgctatgaaaaattataaacaaaataacaaaaagtaactgaatactgtttgttttttaaatatagaaagggaagtttagttacactgaagaaaacaggtaactattcatgggcacaaactgaaaatgaggggaacagattctctcataggtgaatatttttctttcctgagatagtagttttatatgtatggttttgcccagggactacccaagtatagagtttgtaaattgaatggttgcagtaatttctggaatccctataaactatgctaaatatgaaacattctaaatggttggaaagctagtccttataaatttagatactcaatacttagacatatttatttcaagtagttaattattcttaatttgctctgaattcttaagtgtaagaaagctataatgggacagagggagacctatatcccattttcagtatttcaaaaaattcagtatttctgaattatgacacaggttatttcatgttactcaggagctctgttgggtagtatttacataagtaaaactaaaaggaattttaatgctagcggtgcaatgttgaaaacaaactaaggctagttttggttgtatagggtgtagaataacattgccaccctacactttttagtttcctagctattaatttcaccaatgtttatttaaaagcatataaaagtttaattgatgctcatatcaacatgaagggagtcacacattaggtcctggattatgaacattttgcagaattagtctaggaattctgctatggaaagtagaagacatagaagaatgggtttggaggtgaattactggcttcatattcaccatacttattaggttaatactctttatatgtttctcaaatgctaattagtgatttaccttgacgttatataatagcagctgtcatcacatctcaatgttttgtgactactttttggctctagttgatgaaatttcaaagagatggagttgagtaggaaaagtgttggaaatctgtgccccttactggcccatgattttaagaacattagtgtctcatctgaaatacagagattaaatgaggattaagtgaaatgataatgtgtcaaggttttagtactctggcctgttacttgtttttctcacttaaagcgaccaggtcccgggaaataggaggagttaaaatttcttaaactttgataaatttttgttagaatgttgtgattttatgaaatgatctcttaagcgctgtcattctcagaagatcatgggttgtcttaaagtgcttttttctgttataaaatcttggtaaaattcaactctgagcaacaacaaatacaaaattgcctataaagataactagtttttattttgaaatagatatttattgatgaagaagaccttctaacttgtaccactcaagaagcagtgaattgaactaatacagtggaaaatgcttgtgaaaaagaccagcattcctttgactctagactaaaggataatgccacctgagcaagctactgaattattgccatgcactctatggctaattcttcacttattaattgagatagtaggcaaacgctctttcacagatgtgttatggattattttttattttattttattttattattttttttttatttttgagaccgagtttcgctcttgttgcccaagctggagtgcagtggcgtgatctcagctcactgcaacctctgcctcctaggttcaagcgattcttctgtctcagcctcccaagtagctgggattacaggcgcttgccaccacacctggctactttttgtatttttagtagaggtggggtttcatcatataggttaggctggccccgggctcctgacctcaggtgatccacccgcctcagcctcccaaagtgctgggattacaggcgtgagccactgcgtctgtccctggacctttttattgaactacaaaaacaaacagataactttcatttttggattactattaaatgttgtcaaactttattctttagggaaaatggaagtataccactatacagagaataactttgttatactcaaagatagaaaatactgccttggctagatgtggtggctcacgcctgtaatcccagatggggtttttccatgttggccaggcttgtcttgaactcctgacctcaggtgatccacccacctcggcatcccaaagtgctgggattacaggcgtgagccaccgtacctggtggaaattatcctttataacagtcaaccactgggttgtatggttgccctccagtgagatcctatgctacatttgagtgccagtatcctggaggagtctgtatcttagtgaaagcaagggcaattagggtattgtctacagtatgcatcctatttaactggctgtcatgatagaaaccgggagcaataagtatcacataagtaaaagctgttatctccatgtatatcattctccccacttttctccttctgccttcaaatctgagcagtctattataattttaggagctgctcttcctaactgaaatatattgctgctttccagctgctgcctgcagatacttaaaaattgaagcaagcctttcatttcatattatctttctaccaatccatgtgctgaggtaatgcactggatatttttgtcattcagccgagcaagggttctatttgcatgatttatcaagttaattatttgctttgaaacagcagacttagaaagacatctcacttctaggtattctgctactgaagatggcactgcattattgagttattgtactgtactgtccagtgaaaatttctggtagacaaaacctcccagtatttggaaaatacccagagctctgctcaagattcttcttttcatgtttttcttcttattgtaccatgtctgaaactttgggatgcatgacctcatctattaaaatttccctgtggttggagcagtgttttcattcagctgcacactgttgggttactctgaatatgtagcaggtattgaactcttcaactgccacaaaccccatgacccatggtgaactgaaagcaagggtctgtatgtagaagggagtgcaggagcactgccacccctcaccaccgatggtgtctgaatgggattgtagagtctggcctgaatatgccctctccttcagggccaaggaccattatagtaaattgtggttattataagtcaaatggaattgggtctctggtttatcataattgttttgaatttcatttggctgttctgaccactctaacttatgaaggaggtagccaattttgatgtattttagtattaaagttataaaactatattgaatttaactttgggataagctcacagatctgaagtaaaattgtcattcatacggcttcactgagtgggcctatcctgggtagatgctaatgtttttcatggaaatttgctgtgtgagtagagatggcaaaacgggtgactgaatgatgtaatgtctgtataacatcactaccacttactgttaaaatacagcagcacattatctatttacaaaggttgcactgatgaaagtaatggttacagttaatttggacagagattttataaataaatagttacaatatcagcataatcagcaataaggtaattgtaaggtgccaggaatggaaacactgtagctttcatatttctatcattttgaaaaacaaagacagttgctcttgactatgaatatttataattatttgggtggtgttgatgtcttctggctacaaagagccaactagtctataaatataaatagactgaggctgggaacagcgtgtacagtgacagtgtccagaaatgctgaatccttaagacttacagtggagctagatgtctgggatctggggtccccacctagacctgaaatgtaggtctcctccccatatctctctcctgctcctgcctttcttgccctctcagggaagtgactatttcctacatgatgttatacaactggtaaaaggcagttggtaatcagaggtctgtgatctctgtctttgtttctttcctgtgcttaatattgtgatatcatataaaactattaaaatctgaactctgatccatagctgattaaacagttactgagatatacctaccgagtgagctgacttgaaaccttgatttaatataagcataatagtagctaaatttcattgtttcattaggtaattgaaaatacaggcaaaagaaaatgtgaaggagaaaaattttatctgtttcttggttcaggaaggatggatccctgtgctctgtctcatcttaatggacttccagcctccatcctcattcttaaattgtgtctagaaattctcttttctacctctcttaggcttccccagtattcaaaccccagctccaccatggagttctgcctttgtgtaaagttttggaatttatatttcttctgctacttctctgaaacagcattgatacaattgtagaactagagaagctatatgctatgttagaaaaagcacaggactaaaattggacgcaggggtatggcttacaatttcaactctgatcctggttgtctgagtgacatagaatgaataaaatagttccagacccctattgttcatactaatttggaaagtgatctgaagtagaaatgtaaatttatgcatcatcagaatgaattgatggtgaagccatggggtgtgaaaaattatccatgaaacattgcaatttatgatatgagaaagaaaagaaacctaaatgaaagccattacttgaaggatggacagagaaagagacattaataagaaaattgaagagggtcatcagagaagtagcaggaaaaagaacaatagttgtttcgtgaagggcatgggggagggtttcaagaaggcagaagaattgccaatagttctcattgctttggaaagatacagtaggatgagaaatgaaaaatgcctaatagattcattaattaagggctcattagtgactggctaaactagtttcagctgtcagaagggtcaagaataaagttgcaatgaagtgagctcgccatgcaaatgaggaagtccgttgattataccttcaataagctcgattaaagaaaggagaaagagtagatctggacttgaattgttgttgttgctgttgttgttaaaatggaggagattctatgcaggggccagattagtcaagggggtagactaaagaaacaggagaagaggggtttaattgatgtttgatgtggggagagggactggaagaagataaaaggaaatgagaccttgcaaatagagagaagggttagccttaaacaggacaagtaacacctgggacctaggcatttctctatttgactaagttaaatatattgtgtatagactgattttccatttacttacttttcccaaagctatttgccttttaattgtctcactgatttttaacaatttcagaaaaggatgggttgaaaatgactaaaggaaaactgcactcagcagcattcttaaattgtgaaattctagtagaaaatatgtttatgtgtagaaaaattgggaactttggtaaagaatttctttttgtttatttttatttttatttactttttttattgtactttaagttttagggtacatgtgcacaacgtgcaggtttgttacatatgtatacatgtgccatgttggtgtgctgcacccattaactcgtcatttaacattaggtatatctcctaaagctatccctccgccgtcctcccaccccacaacaggccccggtgtgtgtaaagaatatttttttaaaaatttacttgaatcttcttcttcgttccccagtttttagaatttttacaatgtctatgatacatgcacctatacccacatgcatgtgtgtgtatattattaatattcggtaaagagaggctattttacacacaataggccctctacaaatatgtattgaatgtgtgttaaaggcacaaaaaatatttttttctctggataaggaaggtaagggaaattaaaagactgacttaatgtcaaatcttaagtatttttattctactattttaaatttcaaataatttagatagcatggatagaaatttattttttggtaatttgataaaatggtttgctaggcagctttaccctttattctcacttttggacgttgcataattactgaactcagttgttctgcatgtaagtgtaagaaaactttcatcttcacatcagaatatttggattgtaaacaacatttaaagaatgtttaggtgttgtaaaacaatgaagtcaatatactcttaagaattttagagttagctgttaccataagggaaaccagcttttttgtttctgtgaatataattgtaactctccagtaaagtgttaacattcattaaaacttttactagttgagttctggtttctgtaaaatatttgttgatgaaataatttcctttaagaacatgctataatttgcatgtaattacttcagcctgaccttgaacagataagggctgaccattggaggctgaaagcatgtgtgattaaaagttagtctagatgaaagtggcctaggcttgaatgtgagcttcatcatgtattagctgtgtaatcttaagcaagttagtttaaattcctacacttcatagtccatgtaaaacaggaataatactagtgccctcatactgtcataagaattggatgagttaatacttataaaatgcttaacacattgccttactctttctaatcatgttaaccattcttattgccagttatatagatgcttacgtggtaaaaaagacatgaataaaaatacaacaaatttagaatgtgtgagatatatcgtaacattaaacatgtaaaggaggctgggcgtggtggctcacgcctgtaatcccagcactttgggaggccgaggcgggcagatcatgaggtcaggagattgagaccatcctggctaacacggtgaaaccccgtctctactaaaaatacaagaaattagccgggcggtggtggatgcctgtagtcccagctacttaggaggctgaggcaggagaatggtgtgaacccaggaggcagagcttgcagtgagccgagatggtgccactacactccagcctgggcgacagagtgagactcagtctcaaaaaaaaaaaaaaaaaaaaaaaaaaaaaaacataaacaaaaaaccaaaatacatgtaaaggattaaatgctagaggcttatcccaacttagtaaggaatatgataattttctgaggcataaaatatatgctagcttccttacggtatatttaaccaagaaaacaagggtagcattattcaaactactcttaatttttaaattcaacttttatttctgagataattataaattcacatgcagttataagaaagaatacagggagtttttgtgtccctttatccattttccctcaaatgtattattttacattttgcattaactgtagtacattatcacaacttggaaaccgatattgatagaacctgatcttattcagaatttaccagttttatacgcagtcatatgtgtatgtgtgttatttccagttttatcatgtgtagagtcatagtaactaccacgataatcaagatatataacagaattttttttgtcacctgaaggatcccttgggctaccttttcgtagacacagccccctccccttgttccttcagaaccactcatcattactcctctgtaacgtcacaatttaagatttttgtataaatggaatatgtgtgtatatgtatgtatgtatgtatatggtatgtatgtactatgtaccttttgggttcagttttttcaatctagatattcccttaggatccatgcaagttgtgcatattaatagttcctttattctgctgaatagtattccactgtatgccattatttatttaactgttttctcattgagggacatttttgtttttttctttttggctattacaaataaagctatgaacactcatctaaatgtttttgtgtgaacataaatttttatttctttgcaataaatgcacaagagtacaattgctatctagcatggtaaatacatgtttagtttcataaaatactgtcaagctgtttttcatagtggctgtaccattttacattcccatcagcaatgtatgagtaatccatcttcaccagcatttgatgctagcactgtgttttattttagctgttccaatagttgtttagtgatctcattgaaattttagtttgcgtttctctaatggctgataatatcaaatatgttttcatgtgcttgctaaacaactgtgaaatgtctttaatgaattgtctgcatttgctaaataaatagttttttttaagtgctgagtgttcttttattgatggttttcaagatttttaatgttctgtatttagtatggtaaataactgtgagtttgactacctcatttctgtatacatttgtaaaaaatgacagtttttttagtgttttgacaaaaattttcaaaggacattgaacaaactattttattacttattacaaagatttatttgcacagtttcaactagcatatcattttcatattcctacactactgagcaaagtgaagactatttgcagtcattataagatgttatatgtgctttgttaggggatactgctgtggaaactcatagcctttgagaatttgatgtctcagttgggatctgtctatgaataagagttctccaggcagagacagaggggagagtggtcctccatgcagagggaactccacatgcaaagacctggaggaatgagagtacgtggcactttagaggaaataaaaaaagttcagtatggctgcagcatagaccaagaagggcagtagataagctttgaagataggaggggcaggtcataaagacataatctatgttaaatactttatctttatactagggccaaggaagaggcaatcaaatctggactgtacagtgatccctctagttgcagaatgaaaaataaattataggatagtgcaactaaagcacttaatattgtatagtagtgttttacatttaaagttgttttagtgtttatgtttgttttagggtttctgtgatttttactaatggaatatttcttttttttttttttttttttgagatgaagtctccctctgtcacccaggctggagggcagtggtgcgatctctgctcactgcaatcttcacctcctgggttcaagcaattctcctgccccagcctccttagtagctgggattacaggtgtgcgccaccatgcccggctaatttttgtatttttggtagagacaggtttcaccatgttggccaggctggtctcgaactcctgacctcgtgatccacctgccttagcctcccaaagtgctgggattacagaattgagccaccacgccaggcctactaatggaatatttcaaatgattatatactaatcagaaggcccaatagaaaaatgtaaaactgactgaagttgagctacattgaagaaaattgagatggatgatctggaccccagaaatctgattccctctttcaacatccaaccagaccttgaccccatctctctaagcccctactacagtgttcctggcaggctggagtggactgcaaggagaccctttgtcattttgactatgatatttagcttttatttgtttcatgtaagtttcattgcacgatttcatttttgaaaagattctccatgaacaaaatgtttgaaagtttttgcccttagggttttgggagttcagactggtaaattctaattttaagaaggggaattttaaactctggggtacattttaaggaagaactaggtgagaaaatgagctaccaggaacattcatttaatcaatttacttgtgaaaattacatgagaaactgatgatctgtattttatgatattttttctttatttttgaggctgaagttctttaacaaacttttcagttatctatcaaatgttccttcagatatttaaggaattatagtgatgattttctctctctcctttttgtctgaacatgtcctgtttaaattcgcgttcattttctaccacatagtacacactaacctctctgcctctataaaataagaatactgttgatgtggatttacagatgtctttttcccgtgtttatatcaccaccgcttattttggcacagtaatgccaccttttatttacttaaagtgctaagattaggtttaaaaatctcatttatcaggcccttgctcttcaaagagtagaagatggtagaagttataactccaagactgaatgagtcatgtttcatctgtagactcagggctgtctcttttagattcctggctaatttcaggctttgcctcacttttatgattcatcagcacctagcgaagtatcagacatacttgtttgtagaggtgcttagaaattgaagaagagttgaagtaaacttgtcactctttttttttgcttagcttcttttaggttagagggctaagagtatgacattaaactggagataaaagactcaatttagtggctctaaaggagttaatatggtttgcacattgaaagctctactagctaacaggtaatataagcttgcttggtgataacttttcattttaagagtaaatattaaattgtgttcaaatcccacatattttggcctcatggacgtataggcccagtgtttgcattactttaagttattctagagtaactagaaataccaattgttacgttgaatttttctttaaaaacattggcttaaatatttacaaagcactgtgcatgtcaaacaaaacatttctggagacagattgcacctttcatccatctgtttggaagccttgatctagcatactcattactggattctatcagtggtcgttggattgatgaatacctttctgtgcactgcctctaccttctgttttcttttcctttttcctttaagggcatttgatgctgttgataagtctcctgttcttgaattttaacaaaattaccttcctctacttctacttttgcactccaacatatataatacctgctgattgcttcttacaaaacactgaaggctttaaaattaagaacacttttatatctgaccctgattgctacctttaatactttctaccttgctgtgagctagcccatgggtgccctgtaaaaatctagtgtctttgatcctccaactcctttttctggcctgttatttctggctcccatcctgctatttggagtttttatttctccccttctgccatccccatcaagtgaatgcatgtatcagtccatagacatggacttagtacatagttttcttagtacatgattgcctctcagtgctgctccacattctaaaactagtgggtggattgcccatatgtgctattcttcccgggacagtaatggttcatacctgtagcctgggaatatttattaatagtgccctgtttctctgtgcaaaactctgtgttttgctttggaggaagacttatgtggtcacctgacccataagtctcctataatcattaaagagtttccacagttggcaaccttacccaaatcccaatgcttaaatagattttaaatgcttaaaatttccttattacccaagtaaaacagaacaaatagactataacgcctataccctttcaacagcacttcttttcatcaaaatttttcatgtattttacaaataaagcctatgacacaatgatttttttattcttttttttttgaacggtgtgaatatgtttctgtctttctctcccttataacagaatcagcttctgaggatatgctggcttgttttttaactaaggtggtaaaacagcagcagctctttacctaaaatattgcagtgggcacctctcacctcacatttcatttgttcaattatttatatttggtacaataaaagagaagataaggcagagatcatgaaagcattaaactacaatgaatttctgtattttcctgttgatataatctctcattcatctgcaattgtacattcaattataaaccactatccagggagatttagttcttgaaaaaaatctactagggaatatttatgggcaaatatatttcagtgttttatttcctgcttacacttgattaaatgaatatgcagaagaggtgtgaggaatggtaacactccatgattttaggtttgctatagtttattttccattgctctaggttgacagtgaagtgttgttcatgtttctggacatcagatttgagttctttaggtttctcttgggaattttgtcttatgccttattcatacttcttttcatgattttaccttcatttctttcttttctggtaattgccttcttatgtggaataagggagggcaagtatagtatggaaatctctgtttgcaaaagcccttagcaattactaacattcttagataggtggatttttattcgctttcttatttaataaggacacagtcatttctatgctgtggtgcctacatatttttattcatcagtagccaaattagtgattatttttcttatcagtgttcaacaggaagtttgatttactccacctccaatttagaagttaaacaaattgttatagagctttcaggttttcatacatatcttattaaagaaatagctaaaaatacttaataagtaactgaaaagtaattctcttcaattcgaccattatattggattatatttccagtaaaacttctcaaagaatggaaatagggaaaaataaaaatcgatcatacatttgttaacaaactaaaatatttcagtttacaaaaggaaacggattgtcattcttacagaaaattttgtaaacttatggctttaatattcaccatgaataaaatacaataaacatagtttttaagtacaaatatattttaaagatttggggaagggtttttgttatgttaatataatgaaaagaaattattttaatatatctaacaaccattttatttgcaagtgaaagacacttttttattggactagagatggtggatactgagttcaaaacttcatctagtagtctccatctggatttgactaaaatagcttctttttggcagaattttacattttgggtctttgcttaatcagatttgtttcttaatattgcgttctttcatatactgaattgattaattggaaaatttatttgtgttttatataaataagtatgtacttggaaataatgtagcctcatttcatgtttctgtaataataatgctataatgactcttgaatatttttattctccacagctttttataaaagtatatgtgttgtgtcaaagctacaatagatgatctgtacttgaaagccatatcttaactttttttgtcatatccttggggtaactgacatagtctaattcccataggtattgtatttctgataaagcaagatttcaagaacttagaataaactttatgaacaaaaataaaatcgacgtattaatgttgctattttatggaatattatgatggttgcacttttaaattttaattacaacgtagagatcggagtgttataaataaataaaatgtgggaaatttttagatttcttaaaaagtttatttcctgataatgtaacttagtagctcagtttgtagtgggttggatattaatgtatttctctcttttaaaaccatgttttacacgaggaaaaacagtaagtgagcttaaaaaagatctgacagatgagattgctttaccgtgtatttatctactgtccccttcccctcatacacatactcacatggggacttttacagtttaaatgaaaaccataaaggtccctggtataggtttgactttcctgcttcttaaaaacatataaacaaacaaatgaaaaaaaatcaacatatcacattgacccttcttcacggtaaattcatctccagtttctgcaagtttagaggaccctaaggtcctgcaattaatttagtcagttctttcagttgcctgaattagcaggatttttgtgatgccgtatgataagagagaaggtataaatagtcctatgataatatcattctcacggtcataaagggatagaagttccctgagtcagcatgtttacaaggcccctcttctcacttgtcttccccttgttccctctgatcccatcaagcttgctggtgaatcacacagatttcttttgcagtcagagatcaaggttaaaatagaaatttgtattattgtttccagtgagataacattatattattcatttattaggagctttatttactggtgcaggatctcaatccaaagcattttatatactatatgaaatagaatggttttccttttcttttgctgtcaatacaatgcagattccatgtctctcagtaaacaggcaaatcttagtgtttttagcattttaatcagttaaagtattgtcacttaagatcagacttttgttgcatgtaaattaatgttttcattcctttcctatttttatagggatagcaagcatgagattgtcatttgttgtagacttcctatgtgtcaagccttatgtttagtgctttgctgatgttttccaatatattcctcacggtaatcctatgaggcaggctgtattatctctgtttgacagatgaaggggctttcttccagaaaggggaaacaatttgttcaagagtgcacatttgacaaggaaggttccagtaattaaactggtttggtcttactccatttgtattgaagggaacatttacaggctgtataaatgttttatctttctttaagatctgtctgtttactgagagaaatagaattttcactggattaatttgttaggcaactaaaaaataaagcaattctatttcatgtaatatataaaatattttagattgggactttatatcagactattagtaaagttttatcatactatagaaaattggctatatattatactatagaaaaattttatcataccatagaaaacttcaacttttaaaaatgacaggattacttaagatcacacaaaaaagactgcttctctattttcatctttatctgtttccttctttaaatttaccttctttgaatattaatattttttctacatgtcacttaaattctatgattttcagatttttaatctataaaatatatggcacaatcaaatgatctcccaggtccctaaaaatcatagaattctatgagattgtggccactcagagcatggcagggaagacatcagtaatataatatccttgtatccttcttttctttcctgcttctgattgttattcattggaaattttttcagaaagcaactctataccaaggtgaaaggagtttctttcttgcaagataaataagacatttacagcctgaaatatataccttttacaatataacttaaaaaatggatacaagaggtattaagaaaaaacacctaccactttcctttgtagttaacgaagattgagtgcttctattttgaggattagacatatttaattttaatggaaataaggcttatacatttagattcattatctcacagcctttggtataacaggtaaggtttcattaaacaccttaatgggaaaccagatgtatcagtgagaagggatacaaatgcatgtagtatatattctccttgtatggtgattagcacatatattatctctccagcctgagttatgtactgaagaggaattctggactgcattggaggagaaataaattgaaaaacattcttgcttctcctgaagctaagcttcgcatcataacctaattatttgtttctcagatgttgggcttttctcaaatgtcagtgattcaattagccgatacttattgatccctgaccccgtctttagtacaatgctagatgctgtggtttgaagtagtacagggtattgccatcagcaagatgacttgtcttcttgaggagatcgtgaacatactcagaataattaaacagatgacaggatgagagcagctactgtttatttgatacttacattatgccactctcagagattttgtttaatatatgtagtgggaacaaaagtgcatctttttgcctgtatctaaatgtgtaattctctttggtgtcaaaccaaaaaaaacatatatattccatattaaaaagtgcttaaaatagcattcactgaagactccctcagatgtatgtgtatgaatacatgtatctatgaatttatgtttgaatgtatgtatgatatataagtggaaaaacttgcttagaaagaactctctctgacttcttaaagtcctacatcacatagtagttactctgatttttgtgcatctccaccaaaaaaaaaaaaaaatcacctggcttatactgagacctactttccccccccattctcctacattcaggataattttcttctgttccccaggtaactttttaccctttatcatataatcaaattgttttctctagattaattaaaaaatttcccaccattttttcttctgtctacagaggtaccaacaaaagctgagcagtgcagacaaaagtcctctttagaagtgaggggtgggccaggcacagtggctcatgcctgtagtctcagcactttgggaggctgaggcaggcagatgactttagcctaggagttccaaaccagcctgggcaaatgacaaaaccccatcttttccaaaaatacaaaaaaatttgtcagtttgatggtgtgtgcctatagtcccagctacttgggagactgagttgggaggatcacctgaacctgggaggtcagggctgcagtgagccatgatcgccatgatctgccaggacaacagagggagacctttaaaaaaaaaatcacgaggagtgattggagggggtggataaaagactgaataatcatagtctaattttgttgaatcaggctgcatacagcctgattgtacgttatagggtatcatcttatgttttacattattttgataaacacagatctccaattgttagcgaattcagcataagaatcctgatgtaacttgagttgacctttaaaagatgagtgtgatttcatttactaaatggtgatgggagggtttctgagagtgggagcagtattaagtggatggtgagaggatggcataagaaacatattcaccttggtgctgttgatcaggatatagtcatttacccatttagaatagagaatccatgtgaggaagtttagcttcgttttgggtgagaagaccaaggcagtattgctgagatactagaagccaaagcacgttctatcaaatgcttggaacacttgatagaataaacatgttctatgtatggccccaacattcctataaggcagatagtattatctctcttttacaaataaagagcccaagtctataaagagggaagtgttacgaaaatcacttaacttataagttctgatgccaggatttgaaccaaggttgatctgaccccagagttcactctcttagctataggcttagaaaaacatacaaaattgcagatgtttcttagcttaagatctgtcgtgtttatttcagctggacttgggagatataaggactttggctttgtatattttgtcaagcagctaaaaatgcaaacaactctgtttcacgtaatttatgaaatgtttttggataaagcatttaacagctgactttctatttaaattcctcatttgaatggagtttgttaatagaactttaactgtgctatagagttaacctttaagaattttttttatttaaatgcattcatattctagttctttattttattttttgtctttaaatgctagaaagccttgtgatactcttattaatgatgaaaatattgattcttttttcttttctttttttttttttttgagatggagtttcactcttgttgcccaggctggagtgcaatggtgcgatcttggctcactgcaacctccgccttccaggttcaagcgattctcctgcctcagcctccagagtagctgggattataggcacccactgccacgcccagctaatttttgtatttttagtagaaacagggtctcaccatgttggccaggctggtctcgaactcctgacctcaggtgatccacctgcctcagcctcccaaagtgctgggacaggcgtgagccactgcgcccggctgattcttttttattttcatatagacatatatatatcatctgtcttactgcgttacgatatccagaacaacattaaataaaaagatagtagacatcttttgtacattcttgattctaaaagaaatgtttgtgaattttcaccactgaaagtgttgactaatacagtttttggtagctgtactttttcacaataagaaagatttaattcaggcagtctctacccaccccacccaaaaaagtttcttctttgaaaattttctgtaataaacctgttctttaattttttaattgtttttttttagaaatgaggccttgctatgttgcccaggctggattcaaactcctgggctcaagtgatcctcctacctcaggctcttaagtagctgagactacaggtgtgtgctactatgcatggcttaaatctgttctttagaaaaaaaaatttgtagatatttcttttgaatttataatactttttcccttggctctaccattttaattttgttcacaatttagattttattttgttttaaaactgagaatcaatttacaatacacttctatataatttatgaaaatgtattagagatccagcacactgctattcagggtggtgatgggacagaggtataactacataatgagcctttttttttttgtcataactgtgtttagtttaaatacttcaatactgagataaataaccagtacctggctttaatcctccttggatctggcttagtaggcaattacaattgaccatctccattcataattttttgtagaattggcttttggggctttggtgaggtagagtaggcacttatagaaaccttggtctttgtaacaagtagaagctgccttcatgttactaattattatttaatttctataacttaaaaatttttttgtgtgtgtgctgaaacctaggatctattttctcttctcttctcttctctttttttgtttgagatggagtctcactctgtcacccaggcttgagtgcagtggtgagatctcggctcactgcaacctccgcctcccgggctcagacgattcttctgccccagcctcctgagtagctgggattaccagcatgtgccaccacacccagctaatttttgtatttttagtaaaaacggggtttcatcatgttgtccaggctggtctcgaactcctgacctcaggtgatccgccagccttggcctcctaaagtgctgggattacaggcgtgagccactgcgactggccgtatataccttcttatgccttccattgttatgtaaataatttgaagttacttatcactaagataattggccacatagcaaagagaaataaggaaaaatgactcttgagctgtaggaatgcaaatataatttaaaaatcaagtccatgacaaataaacctgtattctccaggcagtaaggcctacgttgctgttctagttgaaacttaaatgagatactaagctttctggtaatcaacttgaaaaggaatcatacaattagttatttaattttcactttacttttttaatggcaggaaagcctttcctagcatcaagttctaaacctgcaggcaaagacaaaggcatagaaaataaagtgatggttctttacatgtttcaagggggtaaatatcttgaagcatctttttgaaaaaatgtttttcttcagaaaaattaaaattatggattttctttcacaaaaattaatttaggcctgtgtacacataattttattccaatgtaccttttggacttagtcttttcttaatctacagttattggtattgtgtgtgacaaattctgtttgagtctgagtttattactaagtgagtgaaggaaatgcttttcaaactacaatgtgaatgcagaattatctgagttacatgaggctttttgaaaaaattacatatttttaactttctgagtctaaaattaatatacatatacttaagataattatttattaatcattgagaaataattcagaggcattatttgcatttgtgtttatgttacatctgctaagtgaaagggtgaactgtatcacattttagagtacatatagaaaaaaaatcaaatgtggcaaataacacataccataagcatgcaaaatttataataagctgtgagatactagctgacatcatattgatgtttttaaagcacagatattgtgcagttcctgattttgtacatattaacttggaaaagtttactaacaataaatatagtaaaacagagaactgtttttattaaagcagatttaaacttttcctgttattttggaatgtactattaaatctattagtctatcaaaagcgtggatcagtggctaaaagttaatattaaagaaaaataacaaaaattatgatgacattaactcaaatgatgtttcattatgatcaaaaccaaaagaatcaaacctaaaagtgaaatgtaaaatataaaacaaagaagtacctatttgccactcttaaatctatttgcatttttggttccacaaagcatcattttatattaaataacaaaggatgttaatttaaactgtattgattttatacatgtgttgtatgagtaaacttatggtatgttaatactcagatatttatctgtgcagagttcaacttaacactgaggtctgtgagaaagttttctttttcaaagcttgggattttactcatgtttgagaaacattgaattaggagtttacccttaaactctaaactctttcatgcccatagtgaattaacagagcatgctttcttgtacatttagaggttgttaaagcttacccagttgctgggtctgctagaatggggggattccataaggaaatcagtttactgagactggtgtctgaaagaaatgttcatcaacagagaaagtcttgaagccctgtctggttgccatgtttatgctgtgggccatatggttatattctgagagtttgaaccagtgaactcttagctatttttaaaaatttgatagagatccaagaaatggtttacacttagacaaagtgacttattttaggaggctgttttagccactggagaactccaatgcttcttgaagttctcaataaatctttttagtttgtctaagaatcagatccttagatttctgcgtcttctttttgcttagctccttaacagcttgaccctctttcaccaccactctcttttactggttttattttggatgggggtggggtgatggtagcaattctgacctttggattttagtccaaatattgattctgggcaactagaacagtggccaaaactacctctcttactcaccctaagaaacttggttgtgggactacagctacctataaaagaagaatcagatgtcctgtggtattattgatgtcccttgtgggaccttttctaagtctaaataagtccttagggtcaagctgtttctggaagcctggcagaaagtttatctgcagcaatttgtcaccatgagcttacttgttagactctcatttatttacttatgttcattttcttaggtacagaaggatatttttttttctgtgttccaggaagcaatttttgccaaagctaccgtggggaggaaaattatgattgtgtttcaatcacaattagttgcaattttgcctctccagatacatatgtgtgttgtagcagcttgtcagttttttcttaccccaaacacattgtcttttgaattgaatgctgatcaggataaatatataacacactcaaaggggaattttggtcttatatttgggaaaaatacattagtagatggctactcagattcaagatgtgtttagtgagggtcaagaggtgaatatgcttcagatacctgaattagttacatgggcttgttagtgcaagattaaatggctttaatttaactgccgatagagtctgttgtgggttcctggaagtcacccaaattgttaatcactattgaaataacatattggtaaaaaataagaaaatttattaattttaaaagttagctgtgtaagttagaagcttagaatgaattttatttcccttgtcctctgtagtattttactgaaaaaaggtttgtaatcagattgctacattccatgctccataataaaatacagagcagcattattttgataaagtaaattgactcttatattttatttataaaatatttaagatttttttgaaaacttttcaaaagcaaaaaacataatagcattatgggatttatatgtgtaaatgcatatgtagatgatttacaaatatgtttgtagcatctttgctgggatgtctcaacaaaattaatgcctccccttctttagatagtatttgttgtttttgtttacggcagtttttcctatatttggtgaatctcttgccttatgagtttttatagccccagaaagaagtaaaacactcaccttttcagccatccttaactaggacatcaacaggtgaccaaatcacaattcagaatacctataagaacattgattaggaagctattgagtaagaggaggcagcataaagatttccttctgcagagaggggaagcatagacttccaggggcagcaaagcacaggacctagcctgagtgttgggagaatgttgtctgcacccagcagtaggtctccactggtggatatacttgagttattatttgggcttcctaatgttctttaatacttttttctggttgtttttgctgaaagtgatacagtggattctgctgtttacattgaagaacttgaactcatctttttcccagccttgatcttcatccagtgtaccatggctcagggaatggcactgctatatatttgggtgtagtaacaagaaatatagttgtatattctggatacctgtctcttgtatatgttatgcatcaccaattttgctgtttttacctcctatataggtcttgattggctgcttcacatcacctccatcatctattactataattaaaaacatttttcctctattgactgccacagctactatcttcctggtctcccatacctattttgcttaccaccctatcactcatatgttttatacattgtggccagagttatttgccagaatgaaaatctgacttatgatagcaaccttcatctcattcagcttaaatcttttctgtgtttaactataacatttaagataaagacaaaactgtttatctttgcctgcaagtcctgcttggtctgtttacttctttgatctccattgtcatcttccccattttctcctctgcagccaaactttcagtctcttttattcattgtacttggccctcttctaggtcctttgcacaagtggtttattttgcctgaaatgatcttcctaataactctctttcattcttcaggtcacagctcagacatcactttttcagagactttctcaccttcctgatgaggtcatatctccccattacatgatttcatagccagactgtcttgtgtagaggtcatcacagtttcatttggcacacattttgttgatgctttgattactcgtgtgatgctgcatccatgcagaagaagccccatgaaggaaaagtactgaaatggtatctgttagagtatttcagattcatcctcatgggttttcaatgcaattttaacaatatttacatcacatgatccttttgctgataaacttcttgttcactttgataggtggcataatataggagctaagggagataagtttattgttaggttcaaactgagatctgagcaggttacttaacccttctccacttcacgttttcctgtacaatatttagcactttacatattcagtaactttctcactggaggattgggtaaattaaatatttttactgtcttaagctattcttttaattatttatatgccagtaagtcaccatcaacacttccactgatggagtatcagctttctgtagatcactacacagaaaggcctaatgagaggtaatagcccttaagaagtttactgctgagcttggaaaattctacacattctaacaaatacaaagtgggcaatgtaaatttgtttattaactaaaaagttgtataatcagacataagagcttatgaagaaggtaggaataaaggttcttaggggagaaaagagaatacaagctttgcaagaagaaggggcacaccaggcaaaaatgcttattttattattattatgaaccatgaactgttaatgagctatgagttcatgctggtggttcatggcaagttagcatggcaaggtttttatggaccaagtttgcgaggatttttgagcaccagatggaatgtatgattcttacttgtgcttgagcatgcagttaattgcttcaaccaatagaattgtgttgttactggtgaatgtgtgtcaccatcactgaagcaatcactactagttcatggtgtttgcagagtttaatccctgcttgtaggatcattgtaaaggaaaagaagtttttgtttatttgtttgtttagttacagaaacagttcttagggagatacttgatggtattttagttagaagaagaaaatgtttgagatatattcttgcttatggttattctcaagggagagaaatttgatcctgtctgtatgcttgagttgcatccatttagcttatgaatgttaatgaaagcctgaaagtatatcacaatagtagattgaacaatgtgacagtgaaatttttgaaactattaagtttcttcttccctcctgtaagagaaaaattacctcccattttcccagcgccttggggtaggggaaggacacctgtgcttgattgttggtctgagatctaactgttacttcttttggctgaagttattttttattttagtttctacagtacaccccagagggaagctttaaaaaattagtgtgggaactaaaactctacaatttctcaatgtttgtgtttacccattgagccttaagttagcatttatgaaaacattaaagtacaattctcagttgctctcagggcaaaaaaacaaacaaaaaaaaacaaaaaaaaaacacactgttggaatggaggtcacttgcgtcatgcagcttttctggttatgtttaaaaggaatgttttgttgaaggaatatctttgggtgattgtatttgttaagacaaagttgaattaattgtatgctacaatcagagaagtatttgcttgctcttcctttcctcaccattggtcaatgtggcatttcataattgaccagatgtgttttggctattttttaaattttgtttttcaaaataactgcattgctagcactgaaagtagaatagcctatcccagagacctgggatatgatttaatattatactttgctcaattattggagaccactaattccattaaagctgccttaagttaatgtagactgaggggattttacaagggtttcaggttttttttttctttaagtatatattttataccaaaaccttgagctatagttgacgatcttgtgaccaaaagcaacagtctcaaaatttgaggagatggcaccattcgcttttacttttttatatcctaggatctcagtttcttttattatatttgtatggtttatgaagctactggtgagatgaaaaataaaataaccctattttctctaccaccctgttttcctctcttttctttcatcttctcagaacttaacattttaaagtgtaagcacttatttcatccctttttccttctactacttgagctcttttcttcattttgctatgcccagtctctcattttttttttttttttgttatcattcccttttgcttttattttccttttcttgtcttagaacctctaaggcagaactgtttcaaacaagcagaccgatttttggcttaggtgatagtactttgtaaataaaaaaatgaaaagatgttttcctttgacagttcccacttccgtaatccttgcaacaatccactcaaacagtgcttttattatatctaagacatttatctgttccaggcctcagattttcatcagtaagatggtagagaggagacatagtggaaagtgacagaacgtggctgttaatttaggcctctgacttcagagcctgaattcttaaccatttcttttgtttgtttgttttttgtttttgagacagtgtctcactctgtcgcccaggctgaagtgcagtggcatggctttggctcagtgcaaacttcgcctcctgggttcaaacgattctccagcctcagcctcccgagtagctgggattacaggtgcccgccaccacgcctggctaatttttgtatttttagtagagacagggtttcaccatgttggccaggctggtcttgaactcctgacctcgtgaacagtcctcctcagcccccaaagtccggggattacaggcgtgagccaccgcgcttggccttaaccatttcataaacaggaatatgcttttatttgggtgatgggggagattatatttttccttccttttgaatatttcatgaagtgtcttttattgtattaagaacttcagtggacttaaagtttaataaaggaagaaacttctttggtggccaattgaactgcccctgtgacctgatgatccttgttcctgagaactgagttgaaaaactttgttcaatctgaattcttctctaattgatcattacttgccatttacttattcaggagagcagtgaccattgttacagttataaaattgaatagttataattgttattagttttgagtcacagtaaggtctagttgttcttcatgtacttcttgtactaaaagtactttagttcttctaggttatgttgtctgaaaagtgggaactttcagaataatagactagttgagttggaaggaaacttacatcattcagtacagctacaggcataccttgttttattgtgctttgcctcattgtactttgcagatattgtatgttttacaaattgaacattttggaaattctcacagtatttcattttgtgtaacaaaatgtaacattttggtaattctcacaatatttcatacttgattattgttaattatatctgttatggtgatctgtgatcagtgatctttgatgttactgttgtaattttttcatgcaccacgaacagctcccgtataagatggtgagcttaactgataaatgttgtatgtattctgactgttccacctactggctgttcccgtctttcttcctctcctcagccctccctgttctctgagacacaacaatattgaaattaagccaattagtaaccctacggtggccctttaattatcaacttaaaggaataactgcaggtctctcactttaaatcaaaagctaaaaatgattaagcttagtgaggaaggcatatcaaagctgagataggccaatagctgggcctcttgttcctgttagccaagtttcgaatgcaaaggaaaagttcttgaaggaaattggaagtgctactccagtgaacacccagatgataagaaagtgaaacagccttattgctgacagggagaaagttttagtagtctggataggagattaaaccagccacagcattcccttaagccaaagcctaatccagagcaaggccctcaacattgaggcaagaccctctactagcaaaaagataatgacttgctgaaggctcagatgattgttagcattttttttagcaataaactattctaaaattaaggtatatattttatatatcttatataccttttttttagacatgatgctattgcacacttaatggactacagtattgtataaacataactttaatatgcagtgggaaacaaaaaataaaaatttggtaccttcagaaataatgtgactaccgagtagaatgttttgactttgagaatattcatttacatagaaatcatagatgtgttgtgcactcattctctttagaccttcagttctggtctttaatgtttaacagtgttgaagtatatccagacaacaggtgggaattgttagcatgatttttagtcttcaggcagtttccagggaatacaggccacactaccttctcttacctttaattgttcatttcaatcttggatcttttggaaaggtgagtgatgattacaaaattggccacaggacaaagcctttattgccttttgggtcatgttactgattattttctcttaagttgcttttctttttagcagctacttctcaaaacttttcactactatgtaacataaaagctatgcaggttggatagctgtaggagagtgccatgatttcagaaattggaaaaatcttaaaacaagagttcttaaacttagatcaatgagtcctttgaaattgttggtgaagtaagtgtgtgtgtttcttggagtgggcgttgaggcaacaatactttaaatttacttcagatttcaaagaaagagtgagagagggagggttatagaggaataggaaggataagactgagaaagaggcctgactcactttgggatgaaagggataggtagagttgtgaagggaagggttaagaaaggttatgaaggttaagtgccattaagttggaagtttttaagtgtaccaccctttaacattgtcatctcatttttaaacttcgaaagtattctcttcatacattttctagttttattttctttactgtttggtggaagaaggaatgagtacgtctaaaggaacaagtattgaagacccatctattcctctcgtcagtgtgccttcgcacatcatggaggtagtctcatttagtcctcacaccagacctcagtggggtgggcacttcaagatgaggaaacaagacagagaggggttaaattatttgcccaggataaacaagtaaatagatgtgtaggaagtagggaaaattggagtcctggaaggtactggaaaggaaatcaaaacctattataaaattagccacttttaaataggaaacagatggcactaatccttttaactatttatgacataggtttcctatgtcataaagatgaaactggaaattttgttcgtcaaagtaatggccaagtacttgttttttgtctccttaagatgtagtaggggaaggggattaaactataaaacaatgcttggccaggtttctaaatcttaatgtgtagtgtagcgggtaaattccatgaggacacccacttcctaagaaggagaaatttgctactttctactgaaactttcattttagtttttttgtgttgcctgaaggtttttagaagctattatcttaaatccatacatttttctattttcaaatgtaaactggctacctagaacaaatacaaagcacttcctcagagatcaagagaaattttgtcattcggactgtgaaggaaacaggtttatatttttacaaggcaatgggagggacatgtcacggatactaaagttgttggaagtagactcctgcaaagatgcaaattcagttaatttgttttgaagtttgggggacaagtttactttttctaactttttctgacattttgtaatatttgcctcatactgtcttagaaacaaactgtatgatgtaggggatagacttcattagaagagaagcatccatcttaagaagtaatagaatgtaaaagctcgaagaattaaaactagactgtacaaaaagtgatggcactgatgtccgtctaaccaaattaatggagtattttagggttattctcaagattgaaaattttgcttattatcatttcaaattttactctttttttttctctttgactatctttgaaaaaaaaacaatacttaaaaaaatatttttgcttaccttcagtggagcttgccaagtttacaggttacacagtccctctgttaggggctggcgaggccaaagaggtttctaatcttaaaaagcttgcactagggttttggggatgcacagacagatatggtatattttgtacataaaagagcattatgtaagtgctatgggaatgcagggcaggaaacacaaatagatagttgtccgacttttttataaaacatccaacttcaaactgaatactccagaccttgttctagatttttggatgaacaacatacatgaaatcccaacttttcatggagtttttcaattaagtaaacaaataaattcagtaagtggaaagtgctataaaggaaataataaaaagtgatatgttagaaagaaccctggaaggaactactttaacagacctaggaatgctgcaccaatagatgaatgatgaaaatcagccagctgaggacagagcatttcaaacagaggaaggtccagtgcatggagactgagacaagcataaacttaggtgtttttttgttttgttttgttttgtttttgtttttgtttttgtttttgtttttcagaaaaaaagcccattgtatctgaaacatcttgtgtaagggaagagaggtgtaagaaataatgttggagaggaaggcaggcaccagatcatgttgaagctgaggggtggggctaaagagtttggattttattctcaatgcaatgtatgagaaagatttaaaaaaattaacctggctatgtatcagaaacgattgtagggctgctagtgtggaaatcataaaacttgctaggattccattctatttgtcctcctgagaggtaataggagtttggtaaaactagtggatatgaagagacgtgaatggattgaggagagagcttgaaaatagaaacaatgagaattgctagttaattaaaagaggaaagtgaaggaaggggaaaaatcaaactgattcctagtttgatcactgagtccttagttttaataattggttatatttgttgccacttaatcagatgaaaaaaatagtggtaggagaagaggcttgaaaaaaggaaatgaaaagatgaacgatatgaaaaggagggtaatggcattgccttcagcacaaaggtaatagcaacagaagtacttagagagattaattttataacaaagaaaaaaaatatccccgatgggctgagacccaaatcatgatttcacttgtcactcttctttctacttagagatcctgattattgcttcttaagctgtctgggcatgaagcaatattattgtatagtgtctttagtttttttacaccaacagtttctggcatgttctttgttactactgggaaaatctcactcaatgccaagagctagctgttttgcacagtgcgttggtgctttggtagctattcaagatggtctccagaacacataaaaatacttttcttatgaggatagaatattacttagtcctctgtactcctccgctcatacataacaatctgattctctgatgttgagagactagagtggaagaaagccctttgtgacggtcaattttgtgtgtcaattagactcagcgatagggtgcccgaatattaggttaaacattatttctagggatgtgtgtgtgtgtgtatgtttctggatgtgattaacatttgaaatggtacactgagtaaagcagatagccctcccactgtgggtgggcctcatccaatcgcttgaagtactgagttgaataaggagtaagaaatccctctgtgtctgactgtttacaagctgggacatcagtctcctgcctttggacttggactcagattggaacttacaccaatggctctcctggttattggactcagacttggacttgaactggaatttataccattgactgtcctgtttctcaggcctttgggctcggattggaattataccatcagctctcctgtcctgagtctggacttctcagcttccacaatcatatgagtctattccttgtaatattgtgtgtgtgtgtgtgtgtgtgtgtgtgtgtttatctatatattccttttctctggagaatcctgactaatatatccttcgtactagggtagaaaatttcaacttttttcatcttcattcttcagacatccaacactctggtgaaggattttgttttctaactgattttatagagtacatctttataccctgcagagactgaatgagtgaagtagactcaacataaataaaagcactaatagtgttctcattagagcagagcgataaaaagatttatgtatattaaaatatagggttctctacatgtgatccaaagatctctgtagaccctcatactctttcaggtgatccatgaggtcaaaattgcttatcaataacattgaaatatagttttccttttttctctttcattttctgatgaatgaatagaagaatttcccagaggttacataatgtatgatactacaacagattgaaagatgaagtaaaaatgagaatctaattgccttctattgagacagatactaaagagatttgtaaaaagtaaaacaatgcttattacttcttactatcttttttgtttattttgggaaatggttatttttcatgaaaatatagtaaattatgagatcattgctaatcttaaattattatttttgagatttttccattttaaattctaatatggtcaatattgatataactcagaaacaaaagctgcttgatatccttagtatcacaagtataaaggggtcctgagactaaaacatttgagaacctttgttctaatataaggtttcttatatataccagcgtgactctgacaaatacattaaatatgtacttccaaacattatactcgttcattaaatccttatgtttggaagcagcataaactagtttcatttgtttttctttttgttgttgttttgacattttctggtaatttatctcacatatagttagaactagtgctgcctcaattgttcatgttattaactagtgtctttgtctcctcattcaattggtaatctaactaatcaagtaacaagtgtttattagacttctactgtatgcaaagcccttgttagatagggtgccagttatcaatttattgccccggagcttaaaatttgtccttcattacctgctctgtcatagtagcacttgaccctttaagcggttctgctttacagctggcacagtgttaagctttgtcagtagagggcactggagagacacttaagaaagaaggatcatctattcttggttgaattgtgatcctaagtttgtttttagttggtggtactgcacagtggacggagctgtgtgcatgtagcagacatagtccctcagtgagcttgtagcaacaaacctggcctggtgactgccttgctgtggcacacacataccccaggcctcatgccactctgctgcagggagaatgtgtcctgtttccctagcttccctagagcaggattggctctggcctgagtgacccagcagactttatcttcccgtgagctgcaactgcaccttctttaaggaaatctgattctcagcaacctcccctgtctatattggtttctttcttgggtactttgattattctttaaggttttcttcacagcgttaaagtttctatcttcttataggtagtaattctttatattacattttcactgttaaatttactgtgtggcttctctcttctgattggactctgaataattcaggtgctttctaagagaacaaaattacccttctgaggttgacaagagatatcccagtaaatcatttaaaattggcacaaaagcaatgtataattgggggccagaatcagacatttagaaactgtgagacagtttgaggacagaaaactggcatgatgtgtggagaaaataatgaggggtctgtcagactggagaaggtggtttgtgaagagaagtgggaggtaaaatgaccagttactttgggataagatcatggaaagttgtgaatactaggcaaagaaattgaaattttgcttttagtttatagggcacattcaacagattttaaataagaactgacaatacaaatattatgttagtgtactaaagtataccaacacatacatatataaaggagttttagaagaaagtatggaaatctatttatcatgaattattttctttgctattaatccaatttcccatgtaaataccttattcatagaagtgtaacttaaagataaaaaataattaatgtataaaatccatagggcattacatattcatctatatactagattatgttattttccttgcccattctttttagtaaaaactgtcatttgttttaagtcttctctgcctttctcttttttaatgaattggaataagaagtactcaatttttgtattgtgttttttgaaatatttagttatttataggatcctatttgtatcctataaatacaaatagaatttatttttaaaagatttaaaaaacacgcttgtgtttatttactatttatcattattcatttgattttcctcttgtaagatagtattcatgtagtctctgttttaataaaaatgtgcaaatctaatgcctattcattatagaactctcagaaactgtacatatgcaaaaacttttttgaaaacctagaagacaattacagcccaccagataatataccgttaagattttgctacatatttttccagtcatatgtacaagtgtatgtgtgtgcatatgtgaatatacacacatttacacagatataattatttaacacaaatatgtatttttcataagtgggtttaatattttataacctgcatattttacttaacatattgtaaatatcttccataaaatgttttaaaataatattattcttaatgactgcattattgttcattaaattgatttgctgtaattttgcaaattactggttattgaatattgagaatacttaatttttctctgttttaaatagtgtaatgagttaggcatcttttaaagctgtatcttttatacatacctgatggtttatttagtatacatttgtagacatggaattcccagatcagaaggtatgtatctctttttttaaaatatactttaagttctgagatacatatgcagaatgtgcaggtttgttacataagtatacatgtgccatggtggtttgctgcactcgtcaacccgttgtctacattaggtatttctccttatgctctccttccccttgcctcccaacaggccctggtgtgtgttcccctctctgtgtccatgtgttctcattgttcagttcccacttatgagtgagaaaatgtggtgtttggttttctgttcttgtgatagtttgctgagaattatggttttcaacttcatccatgtccctgcaaaggacatgaactcatccttttttatggctgcacagtattccatggtgtttatgtgccacattttctttatccagtctaccattgatggacatttgggttggttccaagtctttgctattgtgaatagtgctgcagtaaacatacgtgtgcctgtgtctttgtagcagaatgatttataatcctttggatatatacatagtaatgggattgacacgtcaaatggtatttctagttttagatccttgaggaatcaccacactgtcttccacaatggttgaactaatttacactcccaccaacagtgtaaaaacatcctatttctacacatcctctccagcatctgttttttcttgactttttaatgatcaccattctaactggcgtgagatggtatctcattgtggttttgatttgcatttctctaatgaccagtgatgatgacctttttttttatgtttgttggccgcataaatgtcttcttttgaaaagtgtctgttcatatctttcacccactttttgatgggtttgtttttttcttgtaaatttgtttaagttccttgtagattctgaatattattcccttgtcaaatggatagattgtaaaaattttttcccattctgtagtttgcctgttcactctgatggtagtttcttttgctgtgcagaagctctttagtttaattagatcccatttgtcaattttgggttttgttgcaattgcttttgatgttttattcatgaatatctcttaaaggtcttttatgtcaaattgctgtctataaaggttgcacttaaaacaaacaaaaagcatatatagttttctctgtgttgaatgatatatttgagaactctattgatcaagagactgtaaggaatatttgtaaggccactttaaagaagttttaattaaaagctagtacattgtatgtgtgggaacatagatgttttattaagccttgagataactaaactcttgttagaaatctgaggaattagttagctggtaacagaacaatcgtaaataagcttaaattataacataaagtatgagagaagtacatattgtataatttcccaagtgtaaggattgggagccagttattctgggagactacagaagtgatttttagatgttgataagaatagcacagtatcttctgtgtttgggatgatggaagggaattttgtttcagacaggcagcttcctccctagtgcctactgggtaaattgccgttatatcaagtcagtaggcagaaagatttagatggctttttggtgctagtgcttgcttcctcctttctggaactgtgcaataaatgcattattattccagagcactcggagaatgtggcagtagtcaggcattattgaaagagggccatttagcggaaacattctatagagatgaattatcaacactatttttctttattatttaacttgcttgaaatgttgaaatagtgtagacaagcttttattttgtgacttttgtcttcctagtgatcaaattgataatgcctacaaatgaatataccttgcccatccggtttccctaataagacagataattattgtagcttaagggtacaactgactgaaaattcctaaatggtctttatagtaaatattatgctatataattaaaatgtgacacaaagcatatttttactccaaagtttattttataataggaaaaaatgactattagaaagccaataaatcatttagagattactactttaaagttgacattcagaagccataattgatacagacctctaaaaataatttaaatgcactactgccataatattccactgaggggagggggtggaactgttatagtagtggagaaataggctacaggtttgtgaagatgctgaggcccagtaacaaacactaggtaacttatccaagatctcagggctggtcctcgttgaaaggaatgattggtctgctatgcagtggcgaatctgaaagacatcttgccaaatcaaccattgacttcagaatgtgaatataataaagaatagaaacatcctgcttctataaattgggttgggatccaggatatcctttttaaaaataaagacataatttctccaaaatacacacggacagtttattctattaatgtgccgtctgtgagactcagaaagaaagaaagagagaaaaaaaaaagaatcctagcttacaagagaagatgataactaggaaaaagaagtgaacaataatatcagccactatcactatgatctgtttattctgtacttcgattatactgaagtgttacagaaatcttcccaaaagctctcaaccagaggctacctaccactcagtggcaatcggtcacatttgaaatttggcttctcaaatagttgacaccatcctctctgccatgatttgcatctgttgttgagggttaattgaacaagttagactagtagttattgagtggttaatgtgtcatgggtacaaattttggggagggaatgcagaagattgattacttttacatgttgtcaggaagaaagggtcaagtgcaactcttataacactgagttttataacactacatctgatatattttggttaaaattacatgctagcaaagaaaaaagatattttacaataaaatttgtgttccatcttctgtgtaataaataggcatatttgcatttttgtgatatgtgtctttgttaaaatccacaatgacatgagaacaattggttgtcttactggagagttttctgggactaaaagcagcagcccgttgttcaagtctcatttttgtacttagtctctgtgtggcctttgtctgcaatggaaagtctatatgtgagctatgagagtgggactctatgtcctgtgcctcctcatgacagataaccaatgaacacttactaagtcaaagggatagagtagattggtgattttaaactgggtttcttgtagctctacaagagtttagggactgttacagaactggggccagtagcagtggtgattagctgacaccttagtgggtgagactccaagtggggaaatctgctgtgtcctgatcctcagctctaggcatttttaactttagccctcatactgacactacaaagtgtcctcattccctgaactgaggttcaaagttagtatgttacaaatgatcacataacttgtataaatgatgattttccaatacgaaattagaaatggttccattgtttgcactctaagcacatctccctgcaataatattctggatagcgaaaaataaaggtgtaccctttgtgtaaaccaggccaataatgtatcgcttttgtgtatgtgtgtatacatatatatatatattatattaaaagacttgtgttcagtaataccagagatttagagtgagatctggatttgaacccagctttgagtgttactaattgtgcctcaatttcctaatttgtaaaataggataataacaggttgttgtggagactaaatgaattgatacagaatgtgtactttgaacactgtctgttacctagtaagaattcagttcatctacttatttgattgatgtatttctgtggctgtgttctggaaaacagtctttttaacttaaatttaatgctcagaatggattagcatatttttattgttatatgttccctttgcttatatatctctttagcattattatttgtaatgtcatttcaggttcctatatgatagtggactcttcagatcacgaccctggagaaaaagccagacttcagctgcctacaatgaaggagaacgacactcactgcattgatttcagttacctattatatagccagaaaggactgaatcctggcactttgaacatattagttagggtgaataaaggacctcttgccaatccaatttggaatgtgactggattcacgggtagagattggcttcgggctgagctagcagtgagcaccttttggcccaatgaatatcaggtaatcatctgtacttttctggtgtatgttttgatgtcatcagttctcactatatgtgtaatacatagatgtaaatatgcatctcatggtaatgagagattgccctcttgcctcccccacccccattattggggaagtgtcatacatagatatacatatgcatcccatggtaatgagagattgcccctctttcttccccaccctgttgatgaggaagtgtttggagacattggcacaaaaccttcaaactagagaaagtatttctatgtgttaaaataagtttaggtccaaaatttgttggtggtttgacaaagagctacttattgacagattctttcctacagctttgttcaggaagaaatagcctttttgagtttattgtaatcttcagactggactgatttactgactttttgaaagtaacatttgggaaataaatgtgatgtagagtttcatgaactatgttaagggggaggcattttcattaattattttaattttgattaattaattgaataaattaaatgacatataaaaataagccaaaaaggataagttattcacaaagctttggatgtttgtttcagaaatgattcattgaattatgattaaatcagacaatcaatagtgtcagtacccactttatgattctgtgactgagtttatatgctcttaacaaaaaaaaggttcatttactagtttggagagtttgttcagtaaccctcactatgaggttccgtccctggatgctgttatttctttaaaaggtcaattttgtgttagaccttgagatttaaacttttaaaggacttgtttatttgtagcttattataaagcctaaagagaatacatttatgtaaaagtatattttatgatggtcagcaagcaatatataaactaatagttttatttctgccttttaaaaatgaattatgtctttaagttaggtttgtctttattcttgaaggggaaaaaagaaatgctttgctttaattgctttgtcttgagttgagttttctgttttattaaaagcctcctacattgtaggcatggttccacaggtaagattttcagttcaaggttgtatgtttattgagttttcaatggattttcattagatacaagttgattctattattccggagcataaggatatttctcttcagtcagagagagccatttgctttttcagggtccacagccccaggagggctgcatatatgatatggtaggtaggtggatgggagtgtgtgaaactaatgctagagcacttgttgcaagatcagtgggctcaactctgacaaaagtgggttgatggctgtcatcaccaggtcactctcacaatgcattatcattgtactgatttcatgagaatctgtcataggagcttaacttagcactggaaagaagttctgattcaacagagtcagcctccacaaaacaaattaaaacccccaataaaaattaatctagcacactccttaaaaatatgggttttgaagtcagattgcctgtattcaaccctgttcacaacttgtttcctgtgtagatagttctttaaggaatcagactgtcagttgtactttaaaacaagaacaataacaacatagaagtaactgttgataaatccagcaagtagtatatctgtgatatatttctttttcctcgtaactacgaaataacatacatgtagttattttttctaagttgttaaagatctatctttgaatcattgatgttaataacattttctcatggcacagattactgtggtgttaattctactattaagttacagtaatttgaactggattaataattctttgttcagtctcattttgcatgacaaaacccccttcgttatatgtgcttgtggtgtatttaagcaagaagtacaaaaagtgcctgggtgagttccagcctggccagtgacatcattttggagatgttttgtcagagaaaatgatgactaaataaatacatggaacctatgggtaaatgtctcattgttgcagattaaaatttgagccatagataatttcttaagtgattgttttgctctcacatctttttccttaacctacaaaacttaatcaatgagagcaaacaacagagtactttttattcatgtgcttagtgctcagtaaattacttgtttgatgtttttatcaatttaatcatttagattattagttgtacctgtacatttgtgattagaaacaaccaacataacataaactatatttatgtgctttctttctcttggaaagtaacatgaaaaacattaaatctcccatacattttgatagctttcaaagtcaaatcaatacctgtgaagtgtttggtaagtgctggtttgctggcaaaacacggtagaattttttgattggtgttttaggtgctgatgtctctatatttaaagagaaactcaactgctttaaataccagatattggaggccagtcttgagattccatcaggttcttaaagaatatccccattttcttttattttgaaagcatgacattcttttcaagttttttatttattgtaacatctactattagacacatactgtgaggtcacatcatgctaactcctggggatacacaggcaaagtcccttttctcatgaagttctcagcctagctttgctctgtagaagataaaaatgtaaatcagatgtttgctctgctcttaaggaggctagtccagatgggaaatgcgagatatacatagatataacttgaaataccatagcgatggttaaatgacataagagaggtaaatataaaatgcagtggggaaagcaaaaacaaaagatagtttagtttctgaagtaatttcaagtagaaatgagactagaattcttttgtcgattcctctattcctagatgctttccactgtactgtgtatttttcttaaatcacacttacttagagccagcaaatgtaaattttgctttttgacatatcattacagtgatccactaacatataaggaacaaactgtttttcacctatgtgttcagaacaatcgatgccttttcagcttactatactaattatagaaattatcgtattacatttgttttatttgctatggttgaaagatgctattctacgtattttatgggccacaaataagtactgtagattcttaaattgattgctaaatagaagtaaatagggaaaatcccgcaaatccttaggcgtcatctccatattaaatttcagctgaagatcagcatacctctaaaagcgtaattttctccactctggaaatctgacctgtcttgtattcataaaactaagttctgctttgggattaaatccattaccttcttactgaacagtgaggttgttactaaatgaggcaggcagacgtatgtaacttgcaaaactattagtggaaacctaatctactgttttccattaactgggtgcccatcattaatcacaaaaatgatgtgtgatgaaaactacaggggtttgtccagaaattggaatgtgataatatagcagaaagtgcctttttctcccccaatacatggagaaacaaacacaacttttgcaatgcattttcttcttaacattttccattggtttgaaaaaaaatgtaagaattgacaggcatgagattttctgtttttgtctccttttaaaggggttatattaatgtatattatattgatattttgtcagtagaaagattgttatactccagagattccactggctttggatctgaaaagattggggcttaaaccaagtgaccgtttttacttgaataaaaagcctctaaaagattgatcttcaggcacagaggcctgtgtaagaagaacatactcatgaaccatccatgcaaagagtaaaaagaggggatgtccctcctctgtcatagctctcagaactcttccaatttttttgctgatctgcattcatccatatagagacccactttagaaagacaagcagcaggatttttttttctctagatatatcatatagcggtaacttcctgcataagcattgtaagtgactctgctcatgatcttgtatagcagtgttgtggatattgtttgttgtctatttattagttattctcctagctttcttccatagtggcaggagttccaaccagcttacttgctttcccagcttctttgtaggtaaggatggctatatgcgacacagttctggtcaattaggaaggaaagtctgccaggaaacttctgggaaagatgttcctccctgataataaagagagtgttgtatgagaacatggctcttggtgccattgtgatcattttgtaactgcaaggaaggaaatagctgacaaacagggtgacagaagaaggcattcaaggagcctgggtcctattctcaaaataataataataataaaattatttaaagaatttttagatgactattctcctgtgcagccaaaagcattgttatacatcatgttgtgtcttaagctttcaagcaatactacctgtcagcacatactgtttgtggatggcacatatgagacacgtggcagaatttaaaaaaatatatatctaccaatgaatgaagcagtttttttttttcaatctatttggagagagaagacttaaacagggctataagacagtggatcactgactaaacaggctagaaaggaaggaagaaagatgatctattgggtatctactgtgagtgggatactaggctggatactttcatgtttgtcatcttttacttgtattaatatttgaacgtgtgctaagtaaatgtttcttaccttcatgcacagttgaagttgtgcttacgtagtggtggagcaatattatttcccattttttgtctttagtaaaatagtatgatttttatgagtttggtctttagctgtatcagtgacttctgaagttagccacaactagatagacttattttagttacggcaacaggatttacctaacacggtcatcgtggcttatttttacactggcaaaataccttttatttgataggctattaacaaaacatctttgctgctactttttaatcttaacgattctctttgttgcaaacagagtaccccaaatgggttggaaaggccctcatattattatagtcattgttttcttgaaacttagaatcctgaaattagccgggcatggtggcgggtgcctgtaatcccagctactcaggaggctgaggcaggagaatcgcttgaaccaggaggcggaggttgcagtgagtggagatcgcaccactgcactccagcctgggcgacagcgtgagactctgtctcaaatttaaaaaaaaaaaaaaaaaaagaaaaagcttagaaccctgtgaaggtgacctctctggttcctgatggtgatttgcttttattacaaaatgtctgctctactttgactttaaatagttgttgttgattcattgatgaaacttatggttgtgtaaataaattttaacagatgaacaaaagagccctggtagttaacagaacaattaatgtaaatctgtgacaagcctcttttcattctgctcagtcatacctgcttttatgtagggtggtggcagctgccacagtacccttcattgtttcttttgagaaatatttccataaattagtccaattccctttcagtaactgattgaaaaataatgagcggtcaggagaaataagcattgtttgttcaatgcatgattttttcttacttaggagtttgttttatctaaggggaatgaggaagacagatgctaaaaggagcagtggaagagataccagttctttgcttatgttctcaactagcactcactttggtttgctgaatctgaaaaaatacatttctgatttcttgttttgcatacttctttattaattatttagcgtacattgatcaggcagataaatgtgagaaccatttccgtctaatcagtttaatgatgtttctgacaatgctatactgtttcatataatacatgacaaatagataacaatttaaaattatttttgtcttcaattatgttgtctgctgactttgatagttaattggaattggtctagtttttagggctttccagtttttgaacaacttgaatttttgtgtgaactctgtccattttcatttcaaagacttatttttcttcacttcagtgtgtatataatatgtgaacaaaatattggtgttataagggacaaacaaaaacgaatacgttttttatctaaaatttaacttttgtgctgtggtgatttcagtttcaattcttagaaaacaaatacatttttcatttgagagaatgtgggaagaaggaaatatacagcaaatgtcagacatttgtagtcttttcaattttattattcattacataatattacatagaatctaattattctgttgttagtggggttggaatataaacgaaaacaaactttggacactaaattttactcatgtaatctagtggacaatttatagttaattttagctgtcttgattttcaaaaggtgttcttaaaactatcattataaaactagctactacatgttatttctgcatttagttataaataatcattgcacacaccactggaattcccttatgagaattagattcttaatattctttgaatgatctgttaaaaaatcattcttctcagccctctagaagcagtaaatcagttcacattttatgtttaaaaataaggtctatagtcaaatttataccaagtaataattcaataaaataataaagaatgaaaaatgtctagtacctagagacaaggtttggttcaagcttaaatatctttagatcctggcattttgcaacaacatcacaaatataataattagaaacagataccatggttctctgggcttatatttattaaaagacacttttggtttggttgtaaactttagtaatgtaaggcttacaaagagatgaagtcaatttagctccataaataccaggatgaatttctgtgttttgtttttggttgttgttcctttgtttgtttgtttttttctttcatttaaccccctctttctatgtcttggggggttggagtgagacccattgtaagcagaacaataaagagaaccaaataattgtttttctgatacgtatattagacattgtgacatgaagtgtgagaattagaagtagaaggtctccttttttttttttttaaatagtggtggagaaaaaagtagaggccattttgtatattgggtaaaggtttggattagttctcatttgacctgtgtttaatatccattatcacatgttcatgtccattctgtcaaggcctccttgctcactgagtgactatgttgtgggacttcttgagtttcagtccctgcaatatgggatgatagctagtctactgtgatttattaggttcacaaaattgtctatttaaagctcttatttaaaaataacagacaccaactagagctagttaagtagaaaagagacagaattgaaaagatttgggaatcactcacaacatttaagggaagtggaattcccagcctgaagaaggcataggacccaattagatctgaagaaaacagaaacactttctctctgaaggactgctgtactgacttatttattttatccatttggtgagtggttattgagcaacctaatccatgccaggcacccttctgggtgctggggttggacagtgctgaataagtttcaaggttcctatagtcccaggaattctactctaggggtcagagccagtgggggagaaaatccagataaataaatgagaaaaagattagaatacaacaagtgctaaagaaataattaaaatttaaaaaatatgaaagcagaagtcttagaaactgcattagaccaggtgttctaggaagaactgtcacctggagatctgaatgacaaaaacgaactaggcatgcagagatcaggagaaataccttagagacagaaaaaaaccaaggacctaaatatggaaggaaattggcattgcagagggacagagacagatacagaggtcaaaggttacctttttcaagatgagatgggtagattccagttatgtgagctttgcaatctgaggaaagaatcctaatgctttcagataatttttatcaagggaccctatttactcattcttagtctcatcttgtacgtgcttcccatttatatttttctttagtcttttttactgtttactcacagctctgattgtgtctggtcttgataacggtaatttcctattttctctcaccttaaaatctattataagtcaattacttgttgggagatgctaatttgctgatattgagctcctcagattttgccagtgtttcctttaaagtcaaaacactcagcctttatttgaggtccttcgtcatttagcctcaggcaactactctaatctttctaccattcttttttttaggatgtaatatatgtatgtcctgaaatggctttgtttcttccttttcattgtccaagttctgtttgtcctttaagacccaactttatgtccacttctgccacgtagcctttgcttaatacctctgcactcagtggtctctcccttctccttggacgtgtgttgcctgtattgcttattagacattttgcttgttatatgtatttcaggtatttttcctccaatagtattataggccctcttttaaaaaggtcagggtgtcccataaagacaatataacaattaggtgctttatatttcagaaagcaattgtacaaattttaaaaaaatcatcctcacaatagcactatggggtcactgggaaaagtacaactatttttattttagagataagggctgacagagggtaagtgacttgctttaggtcttgtttctagtgagaatagagctagccctcctctctcttgtgaaattctagtccctgtctcctgtgccagactgtatattggtgatgattttccagtcttggtgtcaaaagaaaattggcttgctgattaagtattcaatgatggtacaagaataaagttagaattattttatatgcatacactttctcaggggacttattctttaatattatttgttaatgtttctttaaaaacactgaatggtttcatgggttgtgtatccaagaattgattggatgaggctgaatacttcatggaatgctcagaactttggtgaactgaagtttaattcatttccacaaccaagtgctaagttcttagtacatgcttagcactagtctgtgtttagggacaaaaccagcaaaaaaaaaaaatgaaaacaattttatacttttccttagagaatataaagtccactaagacaattgcgtatacatcgataatttttaatggaaaatgatggttaaatgagacttggttatactattatcgttaactctatatatgtttgaaaatgccataattaaacaatgaggggaagaaagtcttctgagagagataaaacatccacattggcagccttgtattttgtgtcattaaatgtccaaagagttgttagggtgcagaaaacaatctccaaaatgaagacctccgaagcagtttcagaaataaaagtttctctctgaccttctccttccttcctgtttctcacttctactcccccaaggctagccactgaaactacagttggcttccacaggaacctcttccccatggcagggcatagaaaccagaacctctctttttcttcaaagccagccataacacctaaaaacaactgctctaactttcccctgcctttctgtgaagtaactggccatgaagaaattatctgacctgtcttatttgcatgtaggtcaaaagacccgaatactagaaagggtcctgccctgtacccaggaggaagaaatgctgtacaaagtggccaagaagaatttgaacagacaggccttgctgggtttcttcacctcagtctactagcattaattagatcatactctttatgtgaaatcatatttctacatgggtgtccatacatcattgaacctaagcataaaaatggattttttgccatatctttgggtcttccttctgaaggttcctgtgtcgtctaaactatgatcaaataaatttgttatgtttttctcttgttaacctgtttttgtgataggagtgttggtcatgacccttaaatgggaaggaaaaggatcaaaatattagtactgtggagaaaatagtactaataaaggatctccaagaaggaagaaacacataggctctggggtccagtaaaagttgatctggtacttgagaggctgaggcaggaggatcgcttgaacccaggagttctaatccagcctgagcaacatagcaagaccctgtctcttaaaaaattgagctactatggtgggcatgaaaatggtgggtgtgtaaaggcaggagtaaaaggcacttgaggtttcccaattataaggcatagatagcagtctcaggtggtcagaaatgagaacgatcatactgtgtaaggggccagccatactgctctctctggcccacatggagggtcttgaaatgaggagggaagtagtatgttgaaaaagttgtaccttattgagaagtttccaaatccagggtgggagatttttctgtctgactcctcggtgcttggaccactcagaagaggctaatcagcagaacaatgtgatgacagtgatgatttttacaagtcaatcttatgactgaattcagcagatcaaaggggcccataacacagcatttactggacatccacacactgtacgattcaagccccatcggtctgaactagacctatgaagttgcgttgttcgcatttttagatgatgacctgtggaaagcaaggcatatttttgttacttagttccctttctcttgggtagagatttatttttttgttatgaaaggtaatcaggtttttggcttacaaactcatattttttaaaagtctattcaaatattcttttgtcaacagaattgctaaattttgttcatttaagtttgttctttctgctgggatcccgggggaactttcccttataataaaagctgaaggatgtccagattatgctcttctcctccatctgcctgttaagtccttaatctcctacacctgggtgttctaatcctttatttgctttaagtaccaagtggttccaagtcggacaagttctgtgtccaatatgccaagtaagattcattgtgccatagaagggcatgctactccccaagatctcctggagaataaagtgggttgctgttcacaaatggacctgctggttttaatgcagcccagttaataaatggcattcactcagcatacagccaagagtactccattgattggcagcaggaagctccttgttcatgttgagagttcctttttgcggtgccacttgcctctgagaattgtcagtgggctgccttcacagtgcagcaaaaggtcctttctgctttttcattgccatttgcttcccagtttggagccagttgagttatttagctatgggcctgagttgtgtaaggtacagcatttttaaatgagtttgtttttgtgtcttccttgttcggagttttttgtttgtttgtttttttggaaaaacatccagcaaaggatacggaaggcaacgttatcctgtgcttcttagttatcactatgctaactgaaattcagtggactacccttgtcaagaggttatgccgtatattgagtttcagccttgggtctcactctagttcagagagagctcatgttacagaaacaatcctctcacctcagccaataaatcctaacaaatcatctctacacccagtgagaccatgtatatctatcagctatcttatggagtgaccagaaatcagagagaaagaaggcacaatctacttcccctgttatccaagtaaaagcttagtcatctataactaacttaataaagcatgtgcttgttgggtaaagacagagtagctcactaagcttagaaaagaaagataagagaaaggctattcattgtctagtacctttgcatttctgattagcctgcatataagtggatggcattttttttgtaggcaccgagactggaactttccatattatttttcaatcttattacctctactagaaagacagtggataagggagattacttaaaccattttttgtgatcatattgttgggagggagtgaactggtaccagggagaattggaaattttctataaaaatggtgttaatttattagccatgagaaggagaaataaaaaaaatcagaatatcttaattcagagggaatggtttggaaaatatgaattagaatgacatttgtacttcttattacaagctggccacacaacattttttaattcttaagtttttttaaggttctctccttccataatataaaacaaagaggctgatgagaagttatttcagctgctgaggtaacagactttgacggcagtaactccagtgtggggaggtcagcaagctgctttatgtagcagctaccacacttcagcatagccattgccttgtgtagggtccgaacgttggttgcagaccaggactcctgcatctggtctgtaatgatttcctactctctagatgatctgaattgatttctgattactcctggactctaggctcccccacccctctctgccatcagctttgttccaggaagccccatttataccctaactttcacttcccactcctcttccaagaggaaccatgtccctattaggaaaagattttgtccttgcaccaggggttaagagaattgagagtaggagaggtgatgtctgtaccatgtcttttagttggtctcagtttttaaaaaggtctagtgaatgctcagttggattagactgtgtggtaagtgaaaaaagaatgaaaaatattaaatctttgaattaagaagttgttctctagcagggttgtaattgataacctattgacttgactgttgagtggtgagacatttaatatagagaatggcaaccctatcattttttagtgcccaagattataatattatttatttaaaagtgacatgtaaccttaacaatgatctgccttctcctgaatctttgattcttttctccaggcctactccggtgtacaccacgtgtccactgatgcctacctgtctctttgcaaatatgtaaaggtttcattcagctgcaaagcttggcgaaagtttatgaaacttaagaagaattgatgtacagaaggacagtgaaaaactttgccctgtctttctggacatatgttcttcatagctggacttcgtagggtggtttttacttaatgcctctagttcctttcaaattgtctcataacttgtaacttggttgctattcctttcatgcgtcgaaaattgctgtcttctgatgagatatctctgacttttcccaagtccttattcccgttgacttccatgtaatatttgagattattggactctccttccttccttagatataaaagcctatactatcctttattttttggtaaacttttttgatcgttttttcttttttcacctttttaaaaaaaattcctctaaatgcaagcagttcgtgtatttaattttcttttattaatatttatttttggtgaaatattttatacatgactaatcaggaaatataaataataataatatatgtatgttttatggaaatcgacttaatcttaccagtacttcctaaaagtttctctctattaatcactttccttctatcctaaggaatgtagtattttgaattttttgttcatcattttgtttcttttttctttaatttactttaaacaaatattttgttttatacagttaacaaatgttttataaatggtatcatgatttgtatattttttggctactcgatttttttttcccagtcaatatccaggtttatgtagtggtaatcatttttttcagtgttgtatagcattctatttttgaataagctgaaattgattattcagtcatttgtctatggatagttgggttgttttctggttttctagtggtaatatttttaaaaatgttgttatgagcattcatgtacatgtgtatgatattgctaagtagtgatattgctaagtcatgtggtttatgtattcaacttgttgactctaagctgttcaccaaaatgactgaacaattggcattccagctggcagtatgcatttctattgatgcatatgctgagtaacccttggtatttatttgcacattttcagattatttttcctattaggtaaagataatattgtggtccaaatttgaatttttctgactaccattgaggttgagcatgttttcaaatatctgatatttgtgtttctttccctttcatgttttcatttgtgtcttttgctcagttatctattggtttatctgtttcttatcaattgggaagccttcttttctggtctagatagtaatcatttgacaataatacatgcttgtcttggcttgggtttattttttcagtttcttatagttctttggacaaaaagccttaattttaatattgatttttttttgattttttttttttttactttacaaataaaaaaggaatgactttgttaagaagctcttcccagcactgaggttatttaattctatatttcttctaaaaattttatgatttgcctttccaatttaaatatttgatgactttgggtttgattttatatacagcataaagtaggatatttatgatactcttccttagtgctggattcatgcatatacatttttttctgtgtttttttctttgtttctctgtgtttgtcttgtatgtgtgtgtctatgtgtgtgtgtgtgtatgtatatatccatatatatatatatatatttttttttcttctgagctctgagccttctatctgcctgctagaaatttccatgttgatgtacatcaccttaaactaattatatctaaaatggaaccagtttctcacactttcttactccccctacatctaactggcatctagatcctttaaacatgtcctttgaaatgagtttttatctgatagtttttattcctactaccaccctatttcatgccatgtgacctgaacctcagacctccgaaatgtttcaagtatacctcttgaatttctgttttccccacacagatcatgtgcagctgacaccatattagtattaatttttctaaagtataaattttgattctcttaattttttttcttttgagacaaaatatcactctgttgcccaggctggaatgcagtgctgtggtcatagctcactgcagtctctaactcctgagctcaagtgatcctccctgcctcagcctcccgagtggctgggactacaggcacatgccaccacacccggctaatttttaaattttttttttcagagatgctgtctgcctatgttgaccaagctagccttgaactcctggcctcaagctactctggcttcaacctcctgaaatgttggggttacatgcatgagccaccataccttgccgattctctcgaatgaaagtaacattattaattcctctttgtcatagtaaagtggctggtccctaaggctctctctgtttcttgtctagccccagttctgttttataacatctgtcttctaacttagtttctctttaaattatcttgcatttttgttttcacttattagctcattccattgtatccattgctccactaactggcaaatagaaatccaatccattctatcattcttttggcattcatgattcactgagctataaccttcttgaatgtttttgttgaaataaaggtacagattcttatattttcctttattccctggtatggttaggctctgtgtcaccacccaattctcatcttgaatcgtaatccccataatctccatgtgccaagggcagaacaggtgaagataactgaatcatggggatggtttcccccacgctgttcttgtgatagtgagtgagttctcaggagatctgatggttttataagaggcttcccccttcactctgtcctgccaccctgtgaagaagatatctgcttcgcctttgccttctgccatgattgtaaattacccagtctcacgtatttcttcatagctgtgttagaacaaactaatgcattccctatagcatccatcataatagctagcatataacacataattaataaatactgagggattgattagtagaaggatactggtcttattctatgaaattgtatttgggttcttctgggtgaaattcttttaataacaattcatttgtgtagttaaagtttaaaggatgctattaattttattatggcaaaaatgaaacatttgagttttacttagaataattgacagaatctgtatttttctgaagatccaattttcaacctgcatggatagcctttctttcctaaattacttgttttttaaatgttaactataaatgtttcatttctatttgttttcttgatttcttttctttttgtgtgtttcttgactttctcagccagagaaaagtaatgctaccatagcaataatacatttagattctagtagacttgttttcttacatttctgttttatataaacaaggcgagtcatagtgaaagtacctagactaactattcaagcctgatatgtttatggactctttgtggaaaaaaggaaactttaaatcctctaagctactaaagatgtagaaggataatccagtattatttggtgattcatgtaaagaagaaaaataaaagaaggagaaaaatctggttgaagccacctctattagtcaactttatttcagatattaattagtctgcactaaaatgacagtgataagccaataaaatgatgactttgaaacgggaattcttcaaaaatctagtaaaaagagtatcgactctttcttgtcttctttttcaaacttactgtttagctcatctttatagcattcaagaaaagaatacttgagtagaataaagagctatttttatcttcagaaaaaaaattatttaagaaatatggaagtaacaaaataggcatgccagagaactgccatttgccactgctttttgagcagcacggtggtatatgatccatttcttaaactgccatggtgagttagagtgccttgtttctcacaagttttgttttattaaaaaaatagtttcttgtcttcttctctcttctaggttttatcagtttgttaactgtcttcctagctggactagggagcatgtgctgattgtatgtgaaaatgaactccttgggaatttagcgttctactgaattctcttgaacaaataaatctggagatgcttttctttgtgcaaagttgcatttctttaaacaggtaatcatcgttattaaacttagcaattggtagagttatatatgttttaatttcaagggctttaatgattattttctctaacaaccagattttagagactcataagaagccacttgatttgcacatatcacacacagaaagggttcttagtgagcctttccattcaactactttcaaaaaaacttaaatgttttatgcattttacaaataactttttctcttaaagtccaaccaaaggggtgttttgtgtatttttatcctttacatccattgaaattacctgttctgtatgatataatgaaacatgggtacttatttaagctaaaatatagttgctaaagttgggcctccctgatgttaaatgctacccccttcagtagtgacattaattaaagaaaacttgttaatttgtgagttattctaaaatactttctctcataaagaagctatgtttctccttctaactagtatacttaggttttgcttggcaagactatgtggaaagaggtcttatgtcaccccagcttagcagtgaagagcagaaggcactactgtgcctctcttggtctttttaggtaaaccacaggcaaaatatggagcacatttcagaataatgttaatgctccaaaattgcataagtcctgggctccaaaattgcataagtcgtggggctgtgacacaaccatcttccatgattgtgtttcagtctgactgcagtgttgcttttgtcttcgtagggtaaactctgttgtttcaacaggtatctagacttcaaataattgttaaatgagtgttgtaattgaaataatcagcccttggaactgcaatcattatgaaaattgtatgctctttaaattctatgtaaaaatagattgttttaaagaaaaaaaattcattttaaaaacagaaatgtgcttgaacaacttattttaatggaataaagttaagcaacgaatcttcattccacagctttaacaagtcttccagcttaaggtaatcaactacagcagatattattttaagatattgaggtagcaaagagtcctatctacttagagaatgtatgatttataatagaataccatgcactaatattgaacagcatcaacccatatgaaatcattttattacaaatataacctaggcagtagcatggaagagaactgatgagaaatatagtaggagtaatacactaacggatatgatctccaaatgtttattctctgtcttacttctcacctatggggccgctttcactccctaagggcttctcatagactgacaaagacctcagctccttaatgcaatgccagtaatacggattcataggaaaacttcccagtgaatctagggggtagagtttagtggaacaaaaaagggcgaccagctttggaagctgtagttaggaatggggagacaataggcagaactggagttagcctgcagatttagcgactgtaggtcagagatggggatgcaaaacctgaaatactggtgatgcagattgagtgaagtcagttgatttcagaaatgccttggagatgtaactgataggagtagaaggttattggcatgtgagtttagggaaggaaggcggacatgttgcctggttttctaattgtacaagcgtagtgaatcgtgatgccattttttgatacataagttatttgagaggaggcagattatgagtgtgtatgttttgtgtttgtgtgtgtgtgtatgtgtacactgtgagttgtggggttgaagatgctggtttaggtgactgtgggccagccatgtgccattggctcaaagtttgaatatttaagggttaggagaaagatcctaactaaggagccgttagcataaagatactgacagaagtgagaaggagctaagctagtattgccctggaagaataaacagagtatgaaaagggttcatgaataccaacatttatgatagtctatagaagagccagaaaattgagcctgcaaaaggggccagagaagcaacatataacgagttaagtacaaaccacaatattgagtaacaggaaatttaaaggaagagaatgtttcaagaaaggaacaggtaagactgacaaatcttacagaaatctcaaagaagttaaaatttaaaagatttattgactttagcctagaagactggttttaacttcttccaaatgcatgttttgagtaaataaacagagcaatggaagtatggatagttctgacgcacatgatattctgtttctttcctggcttttttttttttttttttttttttttggaattgagtcttcctctgtcgcccaggctggagtgcagtggtgcgatcttggctcactgcaagctccgcctcctgggttcacaccattcttatgccgcagcctccctagtagctgggactacaggcgcccgccaccacacccagctaattttgtttttgtatttttagtagagacggggtttcaccatgttaggcaggatggtctccatctcctgacctcgtgatccgcccaccccggcctcccaaagtgttgagattacaggcgtgagccacctcacccggcccgtttcctggctttttatgaaaatgatgtgttcttctggtttgtctttggttagcttttttgtttctttatttgtaatttagtctcgggaacttaagataaagttatctgtattatctgctattcttaacagaaggccaatttttgaatgtgctacaaaataatctacctaaagcaggcaagacaatataaatcattttatttttgcttatatagatccagaacataaatccctgagataatatcctcatcctaaaaggaagagtaaagtaatatagccttccagcttggaagaaaggcagtctagttatcaaataatatatgatcaatgatgatctccaactctaaagtaaactcaaacagtgtgtatattcagatgaattaaaaccatatattcatttagtatatgtgataagtagatgtgcatttatagaattactttcttctgaaaaggcaaaaagactctttttataatgtaaataaattaatgttattttaaaaatgaagatactatatgcctgaagttttaatgtacttttaaaaattggatcagagtgtgaaatcaaatgttagtgattaatattattattattatcgtaactaataatattaatgcatgtgcttaacagttctctcagcttcttaaatgttaaattttaaagcaaataacaagtacaatgcaaaatttaccaacacaccaatgtgatacatacttttacctattatttttttttaaaagagagtattgaaaaattatcattttggtttaagcatttgagcaaacaaaataaaatttctgattttaagatttaaaataatgtatgagtaaaaacattattttgggaaaaatgaattgtattaaaagaaatgctgaaattttttacagttggacaaattgctatatttttgtggctttattaaaaatagaaatagtgatatccaccctccattaggggaaacattcacttgtttattcaagaaatatttttcaagtgtcttcttcatgccaggcactattttcagtacttaaaatgtaacaatgggtcaaagaaacaagtcttgactctgaaaaagctctcctgttggggaaggtggttacaaacaatgaacagctaacattataagtaagactagatggtagtacagttatgggaaagaagatagagcagtgtggtgggggtggggtgtgtatgttgaaatctgggaggtaaggacatattgtaattttttttaaattttattttattattatactttaagttttagggtacatgtgcacaatgtgcaggttagttacatatgtatacatgtgccatgctggtgtgctgcacccattaacttgtcatttagcattagttatatctcctaaagctatccgtcccccctccccccaccccacaacagtccccatactgtgatgttccccttcctgtgtccgtgtgttctcattgttcagttcccacctatgagtgagaatatgcagtgtttggttttttgttcttgcgatagtttactgagaatgatgatttccaatttcatccatgtccctacaaaggacatgaactcatcattttttatggctgcatagtatatgtgccacattttcttaatccagtctatcattgttggacatttgggttggatccaagtctttgctattgtgaataatgccgcaataaacatacgtgtgtatgtgtctttatagcagcatgatttatagtcctttgggtatatacccagtaatgggatggctgggtcaaatggtatttctagttctagatccctgaggaatccccccactgacttccacaggggttgaactagtttacagtcccaccaagagtgtaaaagtgttcgtacttctccatatcctctccagcacctgttgtttcctgattttttaatgattgccattctaactggtgtgagatggtatctcattgtggttttgatttgcattcctctgttggcccgtgatggtgagcattttttcacgtgtttttggctgcataaatgtcttcttttgagaagtgtctgttcatgtcctttgcccactttttgttggggttgtttgtttttttcttgtaaatttgtttgagttcattgtagattctggatattagccctttgtcagatgagtaggttgcgaaaattttctcccattttgtaggttgcctgttcactctgatggtagtttcttttgctgtgcagaggctctttagtttaattagatcccatttgtcaattttgggttttgttgccattgcttttggtgttttagacatgaagtcctttcccatgcctatgtcctgaatggtaatgcctaggttttcttctggggtttttatggttttaggtctaacgtttaagtctttaatccatcttgaattaatgtttgtataaggtgtaaggaagggatccagtttcagctttctacataaggctagccagttttcccagcaccatttattaaatagggaatcctttccgcattgcttgtttttctcaggtttgtcaaagatcagatagttgtagatatgcggcattatttctgagggctctgttctgttccattgatctatatctctgttttggtaccagtaccatgctgttttggttactgtagccttgtagtatagtttgaagtcaggtagcatgatgcctccagctttgttcttttggcttaggattgacttggcagtgcgggctcttttttgattccatatgaactttaaagtagttttttccaattctgtgaagaaagtcattggtagcttgatgggggatggcattgaatctataaattaccttgggcagtatggccattttcatgatattgattcttcctacccatgagcatggaatgttcttccatttgtttgtatcctcttttatttccttgagcagtggtttgtagttctccttgaagatatccttcacgtcccttgtaagttggattcctaggtattttattctctttgaagcaattgtgattgggagttcactcatgatttggctctctgtttgtctgttattggtgtataagaatgcttgtgatttttgcacattgattttgtatcctgagacttcgctgaagttgcttatcagcttgaggagattttgggctgagacagtggggttttctaggtatacaatcatgtcgtctgcaaacagggacaatttgacttcctcttttcctaattgaataccctttatttccttctcctgcctaattgccctgaccagaacttccaacactatgttgaataggagtggtgagagagggcatccctgtcttgtgccagttttcaaaggaaatgcttccagtttttgcccattcagtatgatattggctgtgggtttgtcatagatagctcttattattttgagatacgtcccatcaatacctaatttattgagagtttttagcatgaagggttattgaattttgtcaacggccttttctgcatctattgagataatcatgtggtttttgtcttttgttctgtttatatgctggattacatttattgatttgtgtatattgaaccagccttgcatcccagggatgaagcccacttgatcatagtggataagctttttgatgtgctgctggattcggtttgccagtattttattgaggatttttgcatcaatgttcatcaaggatattggtcttttttggttgtgtctctgcccggctttggtatcaggatgatgctggcctcataaaatgagctacagaggattccctctttttctattgattggaatagtttcagaaggaatggtaccagttcctccttgtacctttggtagaattcggctgtgaatccatctggtcctggactctttttggttggtaagctattgattattgccacaatttcagagcctgttattggtctattcagagagtcaacttcttcctgttttagtctttggagagtgtgtgtcaaggaatttatacgtttcttctagattttctagtttatttgcttagaggtgtttgtagtattctctgatggtagtttgtatttctgtgggatcgataaagaggtgatatcccctttatcattttttattgcatctatatgattcttctctcttttcttctttatttgtcttgctagcagtctatcaattttgttgatcctttcaaaaaaccagctcctggattcattaattttttgaagggctttttatgtctctacttccttcagttctgctctgattttagttatttcttgccttccgctagcttttgaatgtgtttgctcttgcttctctagttcttttaattgtgatgttagggtgtcaattttggatctttcctgctttctcttgtgggcatttagtgctataaatttccctctacacactgctttgaatgtgtcccagagattctggtatgctgtgtctttgttctcattggtttcaaagaacatctttatttctgccttcattttgttatgtacccagtagtcattcaggagcaggttgttcagtttccatgtagttgagcgattttaagtgagtttcttaatgctgagttctagtttgattgcactgtggtctgagagacagtttgttataatttctgatcttttacatttgctgaggagagctttacttccaactatgtggtcaattttggaatagatgtggtgtggtgctgaaaaaaatgtatattctgttgatttggggtggagagatctgtagatgtctgttaggtctgcctagtgcagagctgagttcaattcctgggtatccttgttaactttccgtctcattgatctgtctaatgttgacagtggggtgttaaagtctcccattattattgtgtgggagtctaagtctctttgtaggtcactcaggacttgctttatgaatctgggtgctcctgtgttgggtgcatatatatttaggatagttagctcttcttgttgaattgatccctttaccattatgtaatggccttctttgtctcttttgatctttgttggtttaaagtctgttttatccgagactaggattgcaacccctgcctttttttgttttccatttgcttggtagatcttcctccatccttttattttgagcctatgtgtgtctctgcacgtgagatgggtttcctgaatacagcacactgatgggtcttgactctttatccgatttgccagtctgtgtcttttaattggagcatttagtccatttacatttaaagttaatattgttatgtgtgaatttgatcctgtcattatgatattagctggttattttgctcgttagttgatatagtttcttcctagcctcgatggtctttacaatttggcatgattttgcagtggctggtaccggttgttcctttccatgtttagggcttccttcaggagctcttttagggcaggcctggtggtgacaaaatctctcagcatttgcttgtctgtaaagtattttatttctccttcacttatgaagcttagtttggctgaatatgaaattctgggttgaaaattcttttctttaagaatgttgaatattggcccccactctcttctggcttgtagagtttctgccaagagatccgctgttagtctgatgggcttccctttgtggataacccaacctttctctatggctgcccttaacattttttccttcatttcaactttggtgaatctgacaattatgtgtcttggagttgctcttctcgaggagtatctttgtggcattctctgtgtttcctgaatctgaatgttggcctgccttgctaggttggaattgagtagtctgagtgggcttcattgagttgatttttgagcaaagatgtgaagaagacgagggtatattctgaataggtatctactagaagagccagggtaaaggccctgtggtggaagcatgcctgtccatgggttgcaaggagtcactgtggctagatggcagtgagcaagaaggggagaggagaaagaggagaaggaggttaagacagggagggaattgagtcaggtcactttagaaacttgttttgcttcgaaggacttgcccttgactcagaggccatggagagtcattggaagcttttgagtagagaaacttgctaggaacttgatttcagtgatgttaatcgttttttatgttctttagagcacactctgtaaggatgtaagtctaaacttttcttttttagccttttcaacagtaagctatacataaaagttacagtgtagcctactggccatgaatagaagtgctatgtgactttatggtgtcctgaagtttaaggtatattagctctgcatatgtcctgtttccagaatcttaaaaatttaattttggagaatcaagctttgtttaaaataatcaccttaatatgtagatgtggaaaactaacttgcttaagtttattgaaccggatttaccagagctagaattagggtttaggtctcctgactataaatgagaatgagaagcaagaaccaaaaagtatcaactgtgatcagatttgtattcggcactttacttattttgtaccaagctaggctcagtttcccccacttaaatgacattgctgcatcttttacacatttctttgaccaggtgttagtagatcattgcttttactacttagtgttactttttaattagtatgtaaaaaaatccatcctccttttcctccttagcaccaatttaaaaaaaaatcttgctttgtactcacttgagaaatacttgcaatccattaccagcctatggtttttccgtatcctgtaacagaggttggcaaattaccaccagcaggccaaatctgtcttgtggcttgtttgtgtccactatccaatagtggtttttacacttttaagtggttggaagggtagaaaagagaagaatcatactttatgacctgttaaaattattttaaagttgaaggacaatagtttgaaagtattcatatgttgacacatagtttattgcatagtttgtatttcaaatgtaaattaatcatatagttaaattttgaaagagaatcacatattactgacttaaggacttccaaactgtataatggaatcacatgtacaattatgtatctgtttatgtggaaacagataaacatatctgtttcatactgtaattctaaccatatgtctttcttaattactctttgttcctcaaagtctatggtttctttttgagttggtcagccctctgttctttactcatatttacaaacttatcattatgtctacattcataagttatttaataaaacttatttgaatttatgataaagcagaagtagaatgtatattatacacatattatggaaactttgcacttagcatgccttaagtggataaaaaagcaaaaattggcttcttagccaatgtgaaatttaggtaaatcttaaacttttgttttttactgcagatatatttttaattactatcagatataccctctgtctaccaaaatgatagagatgaaatgcaataaactttgtatcttttcccaaaactgtaatgtggtaaattaacttaataaaaatttagtatgaaaaatgcaagtaaacatttccagacttcactaattgtaaatggaaacaagatgctagagtctgtgaaacccaagaggactctaaagaagaccagcttggtaattcaagtaacagaagagaaatagatatgaaacagcatttctacttcagggtacactggagaaagaaaaaagaaggactcctttatgcatcattccaagagaaatagggagaaaaaaactgtgtttgaaggaaaggctgtgatttaatcaataatggacaccttagaaagactgattcttagcaccagggttaggaataataaaataatctgctcatagaaggcacagcaaacattgatttcttctttttaagaatatttgtttatatgatcaaatttactaaaataaaccgttaattacagtgtacatttaaataatgtacttagtttactaatgtatcaaacataaacatttttaattgtccttgtggaaaaatatgtaatatgatggagatggggaagtataaaaaaagcaaagattaaaagaaaaaagaatcatctacagctataagcacaaaggctccatcacagggatatcaagcatgtttcccttagattctgtcatatgcgttactgtctgcttgagtccatctgatcacaatgtatgcacaaggaaacatgtctatgatatgatcgtgtgtctcttttgtgctttttgcacctgaattgtctgtactagagaattgcaaaacaagtttgaaatgaattgtacctcttttcctcagttagttttattgttattgttatttaattgtagtaaacctaagagcctgtaattcagataattcctggaaaagtattttgatcaggcatattggtttggaataggtctgagctttgcattctctaaaattttattacatgctttacttcttccatgagatactggtaagtgatgtttggtatttctgataaggtcttagaaatcccagtccaattaaataataagggagtaaaggtttatggaggtctgcagtagaggatcactattgctatggtttgaatgtatcctctattaagagggaggacttttaagagatgattaagtcatgagggcacctgcctacacaaatgggtttaaagcccttataaaaggtgttggcttgtggggttttgttttgttttgttttgccactcaccatgtgaaaacacagcatttctcctctctgaggatgcagcaacaagtcaccatcttggaagcagagagcagccttcaccagacaaccaaacctgctagtgccttgattttggacttcgcagcttctagaactgtgagaaataaatttgttttaaattacccagtctctggtattttgttatagcagcataaagtgaactatgacaaaacaatggctacctccacttattctatactgatatatttattgcattatatactttgactttcataataattgtatgaagtgaaatatgttcattttataaagaaaaaaactaaaagcctgggtgaaactttcttaaccagggtcacaaagctaatacacaccagttggctgttgaaccccaaaccatttcactatttggctattctttgaccaccaagacacttttctttctttaacaaaggttattgatggtctgtttgcaagataggcattcatttaggtgttggaataaaaatataaattacccacagctgttgcgcttgtctagcttctgtcttgtatggggtgaaaataattataagtaattagtcaataaataattacattaaaattcaaatactataatggatatatgtcaatgtactagttaacacagagtaggattatctattacctgagactggcaaagaaagaattcataggacggatgccctatgaactgcatcctatttttaggaaaagaggaggaaggtcatgacagagaaaataacacatataaatccaccgagttgtgaaagaaatgttctgggagttatatttctttgtgtctgatgcctggggaaaataaatctaaaataatatctgaaatagaaaccagtatttccaaagggaaaatacattatgctctaatttattcacatattaatttttagttttgataaaattgcaattagaatagcaatgggattgttatttaatatattttaaaaatattcatctaggtcagtattcttcaaagtctttttaaaaaatgcatttggacttttctaaataaatactatgagaagatttatgtttacaatatatggcataatttccatgagaaatatgtggaatacaatcaggaagtcagcaatacagaattatctaaaacttattcatgtaagttttactgatatttgttttatttttctatgagcaaaataatttttctttgggtatcctcaattgctttttacaagtccatgtgatatatagtaatctatcttattgatacctacggatttatttaattaaaatagttttttattggtagctgatgataccttctgcaaagaatgccatatttatcttttcatttctaacagtggcatattttatttctctttcatgatatattgcattagcgtgaacttctaaaactgtaggtttttcttcaattggttaaaggagttaaaagttgtggtgagagaactttgccctttttctacaacaagagtagttaaaaacaaatgcctaccagggccacactgtagcataaatatgtgaacagggatgactgtaagaacacagaaaatggcagagcaagagaaattgagaatgtattgtgttaaaacaccatgccaaacaaacacaacataagtttgcatatgcaagcttgatgcaggtaaaggactgatggaggtgatcccagttgagaaagggtatagtactcctgaagagattgctcattataaccacagcagtgggagaaatatcactgtgctgtaagagctgctaaattatttggtatcaatgggtattgattgcaaaacaacatggaccaatgaaagtacagggattttgaatctgagttcaaattataactcagttccttactagtattgtgatcttggacacgtaacttatagtattagttttctaatttatcccataacaaattgccaaaaacttagtggcttaaaattacatttataatcttacagttctaggtcagtagcctgacatgggtctcattggtctaaaatcaaggtgttggcaggaatgtgttcccttttagaggctccaggaaagaatcttggcttttgtagcctcagaaggccatctacccaccttccttagcttatggccccttctgtcttcaagaccagcgacagcagggttgagcccttctcccattgaatccctctgacctcttctgtagctacattgcttcggagtcttatttttctcttttacttttaaagactcttatgattacattgaacccacctgggtaatccaaggttaatgtcacatttcaaggtcacctgactggtaaccttaattcctccttgccatgtaacagcattcccacattctggagattcatatgtaggcatttttcaagaagccattttgtctactacattatcttttaatttctttccttatttataaaatgagactgttctgaagattaacagcaaaaaaaagataaagtatattaaatgccttgtttaataccaggcatatagtcagaattcaataagtgttatctgatgttgtttcctgcattgcttttcctattacacccttagtttttggcttatagttatcctctatttttaaaatcaatcttcagatatttttcaatgattaagagtttcattcagtatgttgcttttacactgataaacatacagggtataagtttaaataagcttaaaaaattaaattgctaatgtgtagaatcctttaaagcagctccagttctctatcctagagaactggcccctgttcccctaatctctacaccagggtttcccaagcctgaggaggtattctgatgaatgcctggagtacttggtaaactgaaatctctgagccccataccaaggatttctgacacggtaggactggggaaagacctgagaatttgcatttttaacaagtcatcagtgtatgtcatcagtggatactgatggctttggtctgtgaccacagtttgagaaccagtgctatagaaataatggggttaatttggctttcttcacatgtgcagttaagcatatctttgtgggtttttttggatgctagctctccaaatactgacaaagtctgcttagtggtagaaaatgtcagttttaagtggtaatgcgtaaacatttttctttatcccagaatgcaaatctaccctcaaaagcactgttatttgaagtgaagcaaattgtaaccatagagtagatatcaaaacttgtgtgcctttctaaccaaagaagcgcatctgaacaagattcatagggagattttggttgtttcccatctttgttcagtcagtttagctggctatttttcagttttgaaaattgtaaaaatggaatggttttccatctgattgtgttactgcttcacaaatcaagtgtcttttaataatactgtcctgaagttactaaatgtagtgccattttttgccacatgacatttatgcagtgcaaagatacttcattattatataaggcatgaaaaacaaagtgttaaattaataatattgtttgacacatccttgaaattgtccttgaattatggtagtatgaaatacctaacaatttgcatcatgtttaaactcagattgctttgatataggaatctagaataagtttctgaaacttatttcatctccataaagtatattacggtggcaaaggtcaaattttctgtatttatctatgtgttaagaggctaagactttaaaaggaggaaaaagagcctagagatgtctcactaaaaccttcaaatatgttatttaaaaggtatcccacaggatcaattgctctttattaaaaatatgattttttaaagaggtttaatgtcattgcattgattgaacaacaatagagaatcaaatacattgttaaagaaatttgacctttaggtcatttaaactgtaagtcagacattctatttcaatactttgaactaagactgtacttagattttataaatttgatttgtggctcattttcttgaagaatagcacatataacaaattgtatttggtgtagtgttaataatgattgaaatcttagtaagacaatataattggacatttctggaccctgaaacagacactgcttctaaaactttgctgtgaacaagaatttcaagtccattctagtggtttataatgtcagagtctttaagaatcacctggtatgcttttcaaacatgcaggtccaagggccctaccactcagaaatgatgactttccatatctttagtagaacttagaaatgttaatttataatatatattttagatgggtctaatgcaagtagttcagagacaccacttcaagaagcactggtgcacgctgtagccatagtgaccatagatttggtggaagtaagaatggattgctgaacatgggattcagatggaaaatggaagaaagccaatgcagtaataagaaagaagaaaggtcaggagcttgaggaaacaattataccaagagaaggtatttcatacttttaaatttaaaagtgctaaagtggtatttgctaatttttaaggaattctcagttttcaaagctaggttccactaaattatataacatatacttaatgttaactgactatagagtgtgaagggggagagtatttcaagcatatgaggatgaataaacagttttttcctaaaagtatttgtaatttaatatagtaggtttcaaatgttcttgtttcatcatttttatttgaggggtatcttacttgtaattctaacatcaaaagcagaaccagatgtctaaaatctttggtttgatttctaacagagctgaatcccatgcccttttatcctctgtttcatgtattccacactcttctaaagtagagcattcttaaagcatcactatggaaattctaggattcttcagcacacaaattgaaaatgattattttagaaagttctcaatacaaaattgagtatgcagatagagatattttcacatgaaatggggaaataatctagattcacttttgtattattatatccaaagcgtatagatgtagacttcaaaaaaatctgtgaattaactgatataaaatttagtatttaatgtgctgaaagccatgtgtgtatgacaagaaacgaatcttggatagcatccatatttatgaaagaaatacaaagaacccccaaaatgagaacagccaacgagtatacagtgaaataactttcagttttgtgaaagctagtgtagtcaagtgtcaagaagcaagctatcacagagccagaaatctgaagaataatctttgtatttaattatacagtctgcttcaatgagaaagcctccagtagagatttgagtgaagaagccatatctcagtgggaagacaagttagttggagatgataaaaaatagaaagtaggtagggagtagaaaattggataagaagagaatgtttggacagtagccacaggataatcatgatcagaaggctttttaaaaaatgaaagaaactacttgagcatatttataaaaggctaatggaaaggagtaaatagaaaggggatgttaaagatacagaagaaattgatgacagacggaatgagatccaggaaaagcaaatagtcaaatgcttagagttggccctgaacagctaacgtcagctcatcttccaagaatgacggaaaggaagtaacaatagagaggatgcacagaggtttttagcttggtgacaagaagttaagggcaatggtgtctagttttgatgatttgtcttgataaagtttgaaaccaaaaagtggctatactgtggtttgtgatgttgaatttacaggtaagaggaacttagatgatcaactgtgaggttgaaggtagataaaagtttggaagtccctctgaggtgaaagagcagacagtgaaaggaggttttggattatcatcacgcttgggagaaactctgcttttgctcatgaaagatttgctcatgaaaatgtggaatacatgaaacagaggataaaagggcatgggattcagctctgttagaaagataaccactgcagttgtctttctgagcaagagttttcggacatggtcttcagggaagacagtactgctattcctgatagatgagaaacaaatgaggtgccccctacgttcatcccaattcacagcctcttggtagtatctgggcctggcagagggagaggaacctaaataggatctagcactttcacttgatgggaggagactgagatcagagctggggaagctgaggcagtgagacattgtagggcaaggaactggagagaaagaagatgcacagaaagaaacacctccagagattaacagagggatcatttcaaattggaatatatatcaggtaaaactttaagaggcaggatagaaatccactgaaaagcagtaggacaaaaaaattctcaaaattcacccagatctgggaactagttggcactcccatcagccaggctagaaaaccttcataatacacaaagtattggatagagtgttcaaaaagatactgccttattagtgggactaaattggctttactctgaaggctacactaacaaagctttaaattaatctttgtgagaattagattaatttacacataacagtgtgcacccctcaaaagcttgatattctttaaaggaatacaacaatatccagcatcaaacaatataaaatctgcgtgcaaagaagcagaataacatgaactgtagctagtggtgggaaacaatccatggaaacatacctgcaaaaggtagagatgaccggactagcaaagatgttaaacagctattaaaaatatgtgctgtgtgctcaagagagaggaaaatatgaacataataaggagagaaatggaaggtacacaaatgaaccaaatggaacttctagagatagttcctatacaaatcatagcaatagaaattattgaaaatgaaacacaaacagaaaaaaatgtgaaaaaagattaatataagctcagtgcactgtggggcagtatcaagtagtctgacatgtaattgggtttcacagcaaaagagaaggagaacaaaaatatttggaaaagtaatggccaaatattttctaaatttgatgaaaactataaacgcacagttcgaagagcacaatgaaccccaagcagagtaaatgtaaagaaaacaacaccatgacgtcacctagtagagtggctgaatactggtgttaggagaaaattttaaaagcagttagagaaaaaagacaggatcaccactggctgctgtggggagggtgcataatagaggcagggcaagagcccagtctttaccctgggtttggttacagagacaacagcttttaaaagtaggtgattctgggtcccgtacagaaagggatttaacaacagtaggatcttccagagggctcgtggatcacggttcgaacaaggcaggggaaggagtcataagattaagtagaactttctggtgcccaggattaaggattgaggtcataaagaatgacctcaatatttctaactttcctatgacatttctttcttatttatttatttatttattttggagacttttttttgagacagcgtattactctgttgcccaggcaacagtgcagtgtcacaatctaggctcattgcaagcctcccgggttcaaggaattctcctgtctcagcctcccaagcagctgggacggcaggcacacgccaccatgctcagctaatttttgtatttttagtaaagatggagtttcaccaagccaggctggtctccacctcctgaccttgtgatccacctgccttggcctcccaaagtgctgggattacaggcatgagccaccacgcccagcctttttttttttttttagacagagtcttgctctgtcacccagactggagtgcagtggtgcaatctcagctcactgcaacctaaacctcccaggttcaagcgattcttctgtctcagcctccaaagtagctgggattacaagcacccgtgaccgtgcctggctaatttttgtatttttagtagagacagggtttcaccatgttggccaggctggtctcaaactcctgacctcaggtgacccgcctgccttggcctcccaaagtgctggaattacaggcgcaagccaccacgcctggcctcctatgacatttcgatataactggctcagattctcagatcatgaccagcgtggcctgagaacattagaatttgctacaacatttgcaaagggatggcaaaagtcagtttttatctgtttttgtgtaatttgggtaagaagacaacagtattcctcttagtatattgtgtatgtataggagagtattggtatgtaaactgagaaataataaggtctccatttgtttcattcaactttatattctttttgtgtaacacaatgctagcccataacttgagacttaaggtatttaatgaacttctgtatactcagttttaattggtggcagttctttaataccagaaacaaattaaagtttttaaagttgacaacagaccccacatacttcccagtcaagcatagtaagaatgacatgaagttttattaagtaattgtatagtagagccctacagaaatttgcactctagtttccttagctttacagggaaggtgacgcttctgacctactttgtatgcattatgaacattaattataaaacatcatgtactttaaaaaatgtcctataaatgcatcttttctgtaaatatcatgcagattttaaaaaggaggtcatcttgtttttgtcttccaaactccagtgaaacagagaataacctttaggagttttgctgcaaagtagaaacattcattcttgcattggacacttttcattgagtgaacatttgaagcagggtaccacatgagatcgagttgtagaagagagaatttctgtcctctcagaacaaacacacatgggtcagtatctataaacaaatcagtatgtgaaaagtatcatgtgattagtccaggatatgtgccctgattgtgaagggtggctgggggccagggtgctgagcatggaggtggaaatcaaatctacataatgtggaaaagatgaccaggatgaaaggcatttgaattgttagtacttaccctggtgacagcaggagagagacatcatagtcacaggcattggcatttaaaaggtgctttgggaattgagagatgggcattttctgtgaattacagaagtccaaattgagtaggagttgggctttgttttggaacagaaattgagaacataagaggctgaatggagccagactgtgaagagctgtgaatgccagcctaataagtttgagctgtatccagtttttgaaaaagagagagagaaacagagagaacctcaaattttaacctgcaataaataccttcagagtcttgcttcagggaaatttaattttttgccatatgtaggccacatggagtcaggcagacttgttagtgggtcattgtggtagtctaggtatagtgagctaatggcctaaaagtgaaatacaatgcaaaagaaaaatgaagaatagataccagaaagattcttaggaactggtgataacatactacaaattgagtggatctttggctaaattgctgctttgtggctcctttcaagggcagtttatttctaactactaaacctattttcttaatataataaatgctcttgattttaattttagtatgaatatgtgcattgcttctatttatattatttttcggtctgtatacttgtatctgaaaatgatagtttaggaatggtcatattttatagattgggccattgaaaattatttaatttaccagacaatgtttaggaatttatagtgttaatgacttacatataaaagttcatgctttctaaaaagccctctctttcccccagcattattacttctgagatatgagaaggaagaattaccttacatttggctttataactgagaaattcttctcatacatcaaaaatgtactaattgtattttgagctctcctaaatcacttttgctccttggtttatatatatttctgagtcttgtttgttgactagaatggactctatttcagagcttctgctttttgtttctgtgtcaccttgtcattttctaaattgattggggcacccttgggggaagtggtctgtgaaggacaagtgtgcaccaaggactctgtaggcagggcaggaaaggagtgagccttgggggcgagcacaagtcaaacacaagctgggttcttcctgtcctcaccttcctggagaaatcaggacactttgctgcgggaaagcatgacctgttttaaccctttgtggtgggggtgttttgttgcaatactgctgtgggaaggcaccaccctttcttgttttccacataggactcatatattcatattttttatacttattctgccctctaatctctttctgcagccatctcattcattttcatcccaactaccattccgttttgtacacttatagctatattattgcctctttatctcacaagttgtggtatgataaataagtgatgtttgtacactgtttttgcaaaaaagctcacagtgctttctgggggtatctactaattaatctttacagaatccctatgagatagatagggctggatagggtattcagcacacaattcactagaccatgctgtctctctattatgataaaggattattattatgttaaaatgtttatacactgaatacataaatttgtagagattgatgtaaaccgaatcccttggcaaaaatatgaacatgcctgtagcataaaattgcaattgtgaagcaggttttatcaacttctggtgtttaaagaattattccagatttgcacattaaacctctgttggatagcttgttttcgttatcttgcctcttggggaatgacagggagcagtgagctactgaacttctgggatttcagcaagtgacaaactcagattcttgatagcgttatttaaaaagtatagcaagctcctctggcttgtgtgtgactcatctacatgtatataatagcttgattgacttatataattagtacttttatgtttatatactgataatatttgtggaaatctagtcaggtattttatgcttttgcagagtttgatgtggattagctgcattgccttttctacaaaagcaaacaccctgaagagttgtctcctttagggagggagcttcactcttttcagtcaacagccatgtatagtcctaagatgctttagtagtgtttcccccaccgtagcatatggattcactggggaaaaacacaaataaaccaggcagcagaaaagaaaagctagagaatcagttctttgctaatcttatgctatcacttccttctttttttttctctcaatgagtccatgttgcttttctctctttaccttccctttaatttcttttagctgttgaacatgtcaaaaactgcagctgctcatgaactcctatttcagctaaatacgtaaagatagattaattctgatagggattcatggaagttgaaagaaacttgagtttgtgtataagtatatggccactggcttgcacctctctgccttctattaggattccaagagagagggatgtagagtgggtttggaattggtgggatggtaagtgcagagatagggggttttaattcctaggcacagggggctccaggaagataggaagttctctaatcaccgaggtacagttctgcttccagggaaggatttatggaaagtaacaaaatatgtatacagtccctgattctagactactgagtgccaggcataggggtgttcttggaggtttctaagacagagaatagggtgataaaagtgaaacaatgggaaaactaacttatcaacttaaactccctggttggctcctgaactctcttccttcagcctttgcccctttcacattcatttggaggaatatttgaggggagaaaaaggagtgcgggaaggataattatattcttcctaaaatatgcgtaagatacagatcatttttggataagtgaaacctaaaaattgttttctttaccattagaccctaaagctcaatcagcacctcctgccttcgctttatttggagaagtccacatctggctggccctgttctcagatactggccttgcctgcttggtcttggcctgccctttgattcctgacctgctctgcagggttcagcagagtggatcatgttacaggggtcagcaggatatcaaactgcctttctgtactgatgtagagaaatagttactgctttgtgctataatatgacccaatgtttgcaaatacagatttctttctcttctataatcttcttaaagggtcaaaataagaaatcactatcacctagatttttttttcctaaaaagtttgattcgattaactgggaagttatttttttaaaaataattactcaaagaatatgctacaaaaagtataaaaatagactttaaaaatattcgaagtcccaaacatctaacataactacaattaatttattagcattttccagatttttctaaatatatgtttcacatactgtgtgtgctctaacatattctgtttgaaaatttaaatgttttaattgaatatgttttcccactttattttgatattgtttttgtgaacataattttcaaagcctggaacatatgcttaagaaattattatagttgaccaagttattctcctaatgattccatactttttctcttaaattttatatatatctttaaaaacacattttatattatttccataaacttaatttcccaaaggtgccttttgaacacagaaagtatggccaatgggctgtattgttaagttgctttctgaaagcatcatgcaagttacctttgaagcttctgtgttattagataatagtattttctttgataaactttcctgataggatagtcacaaggaggagaaggatagtgataattttcttgctactgagatcatataggaacagtattttaaaatgtattcactgacattgagaagctactaggagctcattattgtgttaagtgccagcctcccagggatgagtatgcagaactctgtccctaactttacaggtcctgaggagagtctggcgtaggatacctggttaccaagaagcttgatgagtgctgtcctggagttttgagttgagagctggaggaggagatattaagtttgataaggaaatagagtagtttaactcaagctgtgttttcagatttaggagatggggaagaggttaattttgtttctgttgatattattcatacatgcatgaatttaaaaaattgatgctaataaaggaaaacatcaaaaacccttaacacaattcatatacacacatgcatgtccaatgggtctgttctagtaagtcagtgattaacaaagactttactgcctgatgataggcttttccaggctgatggcaactattatttataaatatgctgtcattgagatgggaaatggcttgggatggaatgtgaggagttgttaataataagggcgttagctgtgatccacgaatactttcttccactcagtacattaaaattttggaggtaaacatgtagcaaaaattgtatggctacttttgtcaaaattaaaatagataatattttaatcttcactttggggatacattatttgcattccccattaagcctaactttctgaaataatgcttcaaaagacacttggtaagagtgttttcttccagtggcttcacgttaaaaaagggaaaaaagaacggctctttggttaacgtctggagtatatgtctacttggcttccaacttcattgatccctgttgaagtagctgctgccataacagatttacctgataagcaattctgcagttagctgaggaaagccattcattggggaatgagtccagttattttgtgtttttaattaaaggtatctaatgctggagtgcctgttgtttttccattttcttaaacatcacaaatcaatatttttttaaacttctcttaatctaggggctgacttatgttaattttttgttgttgttaattagaatcaagctgtaacacattcacagaacaggcatacatgctaaacaatttttccagacatctttttttttttttttaatttaacctcagtagaaatttgggggacttgttctcccagggatttgtatgatttccagctctgttacagtcaacttctaatggctcacagtctgagcctctacataagtgcttaggctgtatctcagagtgattaatgactgagtaggaaagctaaacacacagcactttgtgaactaaagaccagatcaaaccagtctggattctacccccatccctggcctctttgctcaggaccccatcctggactgttattactgattaaaaatcatctctcttttgatgtctgaatgtgttggagtgtaacaagagcactgacctgaaatgaggaggttggtatttgaaccgaacttgaacattgtctctaatacattttatcttattggatgtgtctcattatcatagcctgttaagaattttttatagtaagtttttcagacagtgcattcgatgttttttatagtcttgtgtgtttgagaagtattagttagttatgttatctttcaagtgtttgataataatattaaataataagtagactaaatctaaagaccaagcccagtggccttgtgcaggatggcatctttctggttgataacaatgcattagtcaatttttttccagtatagaggttagactagtcataaagtgacattactttgttattatccagctctcatttctgcaccttgcccataagtggagggtgagagattctttcaaatgctttattgaaatgtagacatattaagacctggccaggtgcagtggctcacgcctgtaatcccagcactttgggaggccaaggtgggcagatcacaaagtcgggatttcaagaccagtctggcaaacagagtgaaacactgtctctactaaaaatacaaaaaattacctgggcgtggtggtgtgcacctgtaatcccagctacttgggaggctgaggcaggagaatcgcatgaacccaggaagcggaggttgcaagaagctaagatcacgccattgcactccagcccaggctacagtgcgagactccgtctcaaataaataaataaataaataaataaataaataaataaataaataaataaaaaacacaaaaacacctgcattgtttcctttacctatttttatggtactactagcttttttgggaaaagagccagaaagtattcatttaaaatgtcaatagaatttcaccaataatttggaaacactgatttgtaggttttttcttttaaaacaaactcaatttattccatttaaaaaatatttggactgtatttgttctcatgttctcatatcatgcccatttttgtcagtattagcaaatagcaaattagattattcagcccctcattcaacaaacagttttaagtacctcagatgggccaggtacttctgcaaattttctccataccttaggatattctttgtttggactagaagactagaattaattcaagacagctattcaaacctaagccatttgctgaggtcgattcataaatcatgttaaaatgttagtctaacctcacataaattaatatgcgtcctttccccaaccttcacttctttggccaggagatgaaagctcaacatggacttcccaccccaggtattgatctcctttcagaatctgcctctgtattactgtttcgagagtcagggtcagcaggaatattgttttgggagaacaggtcacatattgcattagagtaacatatgattattttctgacctctcttctctttaacttaattctcagtgttttgacagagctcttgcatgcctgttccctaataaaggacaaaagacaatcattttcttatgacagtttcgtattttatctcaatctaacagcagcatgaattgataactacttgtacaagtaatgttattttatttggttcaatgtactatgactgacttttatttaaaagacccgttctgcaaattaccttggtttatacttaataggtagtttttataagcttagctccaagttaaacgttcaatgtttgttttattgaattactttctatatgaacttgagtagacagctgttttcatgttagtgagacttttttttttttctttcagactgacactgttgtgccaagctataaggagtagattcttcaggcagaggtcactcattgtctttcagttagagatttagaaaaacttttctaagctagtgctcctgtggtattgcatgctacaaagtggggaggccctttgggacatggtcaagtctttttaaagatcaaatcctcaatttttggaagagtatatatatctcatatacacagtttcttaaaatttagggtttgttgagacacatggaaaaaaatttaaatgccactgttgagtaattttatgctgtatactttttcagggaatagtcttgaactcatcggtgcccacaacttagagaaataatatttggggaacattatttgaaagatacgcaactccttctatgtttcttcattttctaaaaatctatccccaaatcaagccagatctacagagactggcacaaggaagaatcagtttacctcccaatggaattgttttactgaatcacattacactgggagctgcttgctgcatttattgccagaaagcttaaagccagtttatggctctctaataagaaatatataaatgtttatggtaaacatgtttgagctttatttctggctctaattgatggctttattcccatttttctttcttctttctgtccagttttacacttctggaattttcttgtggttaatatatcctttcagcttcctttagtcttttctagaatggaggcagaatctaaataaacaaatacaaaacatctgcagtagaaaaggataatgagaaaagaatgattttttctttgaacttctgttctgtggtcaaagacaatatttctgctttcttaaataaaatagcctggtaaatgctattagtagacaaataaagaaatttgtatttaaattacttacagataccataaaactttatatgtgttgcctcaagtagaatcttatgctcttgttgttgaataatttagtatattggcatttatagttaagacatcctattttaacatgattttaatagtgaatcacttaatatttaattaaatagttaatgttaccttatgtgcatacttaaaattttttttaaagtttacatatatcatcatactgataggaaaagtctataaagtaggcaaggtttatatattacccccatttaaaaggcatggttgggttatgacttgccaaaaaacaaaaggcaaaaaatatatcatgtggcaaagaaaaataagacattaaattttgaaagaaccttatgagtcagacataattcatcaagtacagtttgccttttagttttatgaaatattaatactgaaagggaccttagaaagtattttgtccagccttctgattttatgagtgaaaacaaccaactaattttagaacattcaaacaagtattagaacctctactcaatggaaccatatttatcccctgtataacttcaaatagagttgagtagtctaatgtatattcccaaatacgaacattaagaactttaacacctggttcagtgttttgacccttttaacctctcattactgtaaccattattaaaactaaactgtactgtcttcagttagcaattgattagctcttttttctttagagccaaatagaccccaaatgaaaatcttgccacaggcccttgaactctttcttttactcttcccatgtaacattatggagtttgccggttggttataaatagataaataaacaaaaacagagccaaacaaataaatgtaaatagattaacatatcagggctctgaacactcagcttcacatagaaaaaggtaaacaaacatagataagtaatatttgcagcattgtttataacataagagcttgagtcagaatcctttgagttcaaatcctcattctctctcatttcctgtaagcttggtcaagtgagtcagtaactgtagctttgtgtctttatctgtaaaatagggatgatacctatatcataagtgttatgttatgattaaaatgaaagtgtgtgttgtacagtgctagtgaagtataaggaaatatgcatggtaagtgttcattctaacatttggtatattgcaatcgcacagatttatttttttcttctctttggaaacaggagcataacttgcttatcctataattgaattatattattataaggtgttttcaaacaggattctattgaatgattttagttatcagacctcaccagcaccaaaaaggccattttaatttatattgtttttttggttagctgaggccagaaatttgtcttctgaattttttcttgataatctaaaatggttcaaacagacattaattttagccagactttcaccatttcagtttgtactctcctgtaatctggtctacaaattaaatattgagacaacatacttgtcactttttggaggcatttctaaaccatttgtttggatacagagtaaaaatacttttaagtttatttatatagtgatcaatggaacaacctgagtttttaaatctgggtgtgaatgctgatgattgcttctgtagatcatttgctcaaggagctgtgatataattttaaatttaattcatgaaattgtagatcccggaaagtagtttattatgagacgcatagtaaattttaaaatgccctcaatagtattttcacagtatgtttttaataattactaagttgtcttcataggcccataatagacttagcaaaacactggtttatatttgtagttttctgaattttagagaatgtgagggtttttaagtgctggaagatggaatttagtttgtcagggaaaaattctaggcagagcaagtaaaccctgtattctgtgttgtaggaatgcagttctttcaggaaatttaaggcagtaacaacaaagcaacaataatttagtgttataattttaaaacctattgtttctttgaagtggtgggtcattatttagacttgctattctattggcaaatattcattttaatcatattgtaaaggtataatttaaatattttgaagaggaaaaatctgtaccttgcataacagagtcttgatcctttagggctgttagtctagtagattctgttgttttcactcttaccatattaataaattcaatgaaatatgttcattaataataaaaaggcacatcgcttatctctgtatgtatgtatttggtgaaaagggggagtataactttataagagttttcattttgcttgctgaacaactaactgtttgattttgatagtgaggagaaagcatgtaaaattcatactattcaggtgcttttgagacattacagtgataaattgcgacttatgcactgactaattttccatgtatcctttactggaatgtttcttattaggaagtccatgagtgtactcaatggagataaccctagacatttcattcctgaatctcaaatgaaaggactcttggcccaggacacttacacgttttcgtctggagttcaatcttgaggtgattgtagcagaagatgttgcatcttagactgtatgtctgatggagttttggagattcgggttcataatgtggggacagtggatctcagtaggttgtttagttttgagcttcaaaggcttgtaaactcaattttacataggaaggaggatagatgcttttcatagaatgggtataggactttgcaaagattaagtgtcactgctttctgtaaacagttgatagttatacaaaataaagtccatctttttttttctttttttattatactttaagttctagggtacatgtgcacaaagtgcaggtttgttacatatgtatacatgtgccatattggtgtgctgcacccattaactcatcatttacattaggtatttctcctaatgctatccctccccactcccccgaccccgcgacaggacaggccccagtgtgtgctgttccccaccctgtgtccaagtgttctcattgttcaattcctacctatgagtgagaacatgcagtgtttggttttctatccttgcgatagtcagaatgatggtttctagcttcatccatgtccctacaaaggacatgaactcatccttttttatagctgcatagtattcaatggtgtatatgtgccacattttcttaatccagtctatcattgatggacatttgggttggttccaagtctttgctattgtgaatagtgccacaataaacatacgtgtccgtgtgtctttatagcagcatgattaataatccttcgggtatatgctcagtaatgggatggctgggtcaaatggtatttctagttctagatccttgaggaatcaccacactgtcttccacaatggttgaactagtttacagtcccaccaacagtgtaaaagcattcctatttctctacatcctctccagcacctgttgtttcctgactttttaatgatcgccattctaactggtgtgagatggcatctcattgaggttttgatttgcatttctctgagggccagtgatgctgagcattttttcacgtgtctgttggctgcataaatgtcttcttttgagaagcatctgttcatatcctttgcccactttttgatgagattgtttgattttttcttgtaaatttgtttaagttctttgtagattctggatattagccctttgtcagatgagtagattgtaaaaattttttcccattctgtaagttgcctgttcactctgatggtagtttcttttgctgtgcagaagctctttagtttaattagatcccatttgtcagttttggcttttgttgccattgcttttggtgttttagtcatgaggtccttgcccatgcctgtgtcctgaatggtattgcctaggttttcttctagggtttttatggttttaggtctaacatttaagtctttaatccatcttgaattaatttttatataaggtgtaaggaaggaatccagtttcagctttctccatatggctagccagtttttccagcaccatttattaaatagggaatcctttccccatgtcttgtttttgttaggtttgtcaaagatcagatggttgtattggttttaacctatattttaatgactaatgcatatgtggataaatctgttacaatcagtcatgcagaacttcattatagttaacactaagatctttgctttaggaaactgaattactatattaacgagtactattaatatgataattcttttaattttcttgatacactacacaataaacctttcagttcaatgttaattttaagtaaaactcttgttccaactcttcaaagtaaagtaaataaaccagtcaaatgtgctaaaggcacaagcagaagcgttggccagagattatgcatctatagtcttggaggagaaccaaagatactataatcacaatttgccaagtctgactaatgactccttcaaagttgagaacaccagtgtgctgctagggttttgtgaatgctttaaactttgattgagaagggggtcttctgagcttaggccaggctgccagtagggatttgcacctgatcagacctttcttttttttgagtacttaatagctgcttctgccagaaaaccagatcaaagaatagcaggggagattagtacattggttttatcagccattttccagctacagctcttataaagctgataacaggataggggtgaataaaatcatctgctttcaacctccctgcagtgctttcatcttgatttaagaaccaaggaggaccatgtctacagtggacaccaggccggtcccctctccatccctgtcagagtttaaagcacttaactagtaatcactgctctgactctggagtagtcagctaccatgtttcctttgcttttgacttggcaactgctgtggcttctttagcacctggtcctctgccagccatctcagttaccttggattgactacagaagacttttttgaggtttgtatttctcccactattatgaaggcaaacggttgcagcctctatccccctccctaggtagatgacagaacacatatagccttttgtctatcctttttttttaataccttcaaggctactcttgatgttaaggacctaaataaaacaaatcttacttgcccaaagtggacagtcgaagtagtcggaatcatagctttttaagattttttttttaagaccttagctatccagttctgccctctccttttatacagcatatgtgcagctaaaaacaaagcattggtctcttaatgcctgattggtacactgatgtctccttaaccaaatagtatgcttggtctatttaaacagaatgattcctgagatggttttggctgagaaataaattaaaattttctgaatagcattttgaagaaatgtgtactatctgaaaaatttgcaaaaatacattctaaaagttaagactactggatgctgcgtattgtacattctctaaagacgcatatataattgatgtttctgacattgctagtatctgtattgtatatggaaaatgcttggaattgaatatggtggaattgcagttttaatggaatatgcttactttgtaatacattgactctccttttatattcaatgtgtactaattagttatggtcactgtatgtgtcttcctaatgttaggggttgaagtataatagattgtaaaataccttgacctttgagccagtagaactcagttaaatttttatttgtcactaatttaatgaagcatttggaattctatttaagctatatgtgtcacttttctcatcccagaaaatatgttgatccattttagatactttctaaggtttcctcagtaggaaaatcctaggagaggacttagaatataatcttactgctcaaaatgattatatttatgctgattgcatatttacatttttcttttattttaataacacatggttgatattgttgtaatttattgatgtcaaaaactctaccaaaattataatataactatgagaaagtataatcccctttacagctatcttgttttatgaagtggtttccaggaaacgatcttagcccaaaagccagaactgcctattatgggataaggataatcgactagcaggtacaatcagcagaaaggaaagtgaatttacttggtttaaagactttcttgcagtcacagaaaatgctaaattgattttgtttttctccatagaaaaactgcagcacgttatataagaggagttgctttgggagactataataccttttacagactaatcagtgattttaggaaatgttgttgttggaattagctggaaactttgtaattggaattgactcaactttcatcacaatctctctctcctcctttttttcatattaaaatcagctgatgaattacattgtctctgtaatgtgtttcatatccagtaaccttctctatttccaccagcatatggatttctatatgccattctcccaattaagtgccctcccctgtcatcgacatccaaatgtagggcaccctgcaaggtgacattaaatgcattttctttatacactttaactgactttggagaatcaaaatcttttgcctctctaattataccttttttttttttaaatttatttttttaaccatcctgttagttaagatgccaccctcttttgggcctctccagcttcacctgacagtctctcctctgtgtttcagcagatttatgtagctatctctgtcatagaccatatgatgtcctcttgttactacctttattttatctagtctctggctttttggctgctgggattgtctttattttagctttgttacccattgccctgcagcagtgcctgacatattacagatgctttctaagagaatttatcttctcttgatgacaggatccatgtattctaccctatcctgccttctatacactgccttgcacagtattgggcataaaatttggtgttaaagttaagaattgccccttaaacccttatcataatttaagtacttaggtattcttgatttatgctatgtgttgttttttgaactcttaatgaacatcttcattaagagttcatatttacaatttattggtggaaagccaatgataagactaataattattcccttcaggaatgttaaccatacagtttctgatttcctaccaaggtaagaaaaaagcttgaaaagtatctctcaatagaatatttaaatcctctgtgtttatttacctatgtgttggtaaactcatcaagaaacattttagttatctcagtttatcttaagagaatatatagctagcaaagaataaaatggtaagaatggattcaatatattgaaagtattttactttagatggctatatttaaaggggacgtagtactccagataaaggactgatttaaaggtaggtgatcaggtgactgtacagtaattttattagagccattctgttttagagattgtaaaacaaatgaattgttaaaaataattttactgttcactggggcacaatgattattacagaataatgactttttgttggcaaggcagttgggcaaatataagtaaaccattttacatttttcgcctgtctttgatgctttgtctttctgaataaggaccccattcccaagaaaggcgaaatcataagcatttctaatagctctgtcttctttcatataaagtttaattaatggttctctcactttttctgcattttatgtttcctctcacgtagaaaatatgtctttttgtgctcaataattgatgacccttggagtttagtgacaaatgtgagttaatttaagtcatcaccatcaatttaacaagcacctctggtaatacgtttttcacttttaaaaaattgtatcatgaagcaaaatgtgtttctctgggaagcagcaaagattataagataatcacacacctctagggcatgagaatgggaaaggttcaggtaaatgtatctattcatttgacataatgattatttcataataactgaatgcttccatttcagccttccccaccgccactatcccattcctccctattctgttagtctgggagaagaataatataatttttcttgtgtgctaaaatatgatgctggtagttttatgatggttccgtatatattttagctgaactgtacattttcttataatcactagaaaataagaatggtctcttagccccagtagttgatgtaatagtgaaaagagatatatcttgaagtcttttgctcacgcctttcccaataaaacttatcagatctcctttttccagaagtctccaatttaaactcatattctgctgttacttacaattttgatgtacattcatgtgtttgtaggtttttactgtttgtagaatatttaagctaatagttaacattgtactcaatatttcaagtactgttacatagccacagttccaggactggagacaagggattgtatatgttgttattgtgaactgtggtgtcttgtggcttgtttagtcaattactcaatataaacttttttgaggaagttttttgggaattattggtaatagccaactattggagaggaagttacacagttttaaagagcattggctttaggatcaaatccagttaaaataaaatcccagtggaatcacttgccatctctttccttgtacagcttataaagtgtttttattctctatttttattatggctatcaggtacaaaaataaaagagagatatttccccccatggaatacatgggttttaaatgatacagcagtcaataggttttggtgaaataataaataagacagaagaaataagagaggacataaaataattcatattttgtggactcatctagtgatttctcttcttggtaaattggttgaaaaaatgagttacatttttgcctgtttaaagatgcatttatggcaggtagataaatcacagactttattcttttttccatttacttcatactgactcatcactgatgcacacccagaaaaataacaaatcagcattaatatatgagcctttttgtttctgcttatttgtgaaaaacttaaatatcgaattagcattgaattagctatgtgatttcataagatttttatgagattaataacaatgttcaatatcataataaataagtttccttacagttgatgatttctagaataaagtgagatataattttcactcagattgtttagaatttttgtttttcagaaattactctttgctatattcctccttcacatcccacttcagttttggtcttcacttccatgcacaagccccgctggttaggctagcttgaaaacattgttttcaggaagcacacaaaaacttccgagttgaaagctggttcagcacaagtttgttttatttctgactccctgtgagctttgcttggattcttccctttggcattgtgtgtgcttagatgtgtattcagtatcctgcacttttggacatgttgccttccatgttggtgttatagtctcgtgattctattctaggaaagaccttagattttgtggtccaaggatgaaaattcatagaagaaggaattgtggtctggagagagtaagtagcataatcaagattcaaatcaggcttgacctctaaattcagtgtttcttagcaaattgcacgtaaacttattcttttaaaactgcctaatccagtgcttttcagactttttccacgttggtatactgagcctcattaacccatctgtctgggtccccagtcactgccagaccactggaaagtgaagggaaacaggtatttggtagacatttgctatgtgccactgtgcagcgtttagtgatattgtcaaaagttcaagcaatagcacttacttctgtgtcctttcccagcctcaggaccttttgctcttctagtagctttagccttgtttgattcttgttctgtatccacaacctactgccgtccttcctgcaagaaaatgtgtgtgctagcttagtcacttcagtctgctatagcaaaatgccataaactggatgtcttataaacaacagaaattgatttctcactgtcctggaggatggggagtccaaaatcaaggcaccaacagacttggtgtctaatgagggtctattttctcgttcatagacagtgcctactcactgtgttctcacagtgcagaagaggcaaggatctctcatgaataagggcactaatcccattcaccaaggtggagtccgcatgacctgatcacctcccagaaacctcacttcctaataccatcgctttggggattcaaatttcaacataagaattttggagtcaaacagatattggaccatgacatgtatgaatttttaaatttttaatgtctctaaaatacactaagaagtaattaattaaatgttgtaccaccttagagattcaaatgctttcaaatttcaattcttagttcagggcaaaattttgaaaggtaattccatttgatgagttcacttatatatcacactgcatagtaagcaaaatgcaagaactgtggcaccagactatctgggttagaatctggtgctgccactgaatagctgtgcgaccttgggagagatacttacctttctttgcttctatgtcttcatcagtaatattgcccctacctcatagggttgttacaagaaccaaatgaattaatatttaaagcagttggaagagtttctagtacatgatcagtattatctatgtgtttgttagcaaatgactaattaaaaagttatttatatttatagtaaattttctttaaattgaaagtttcaaaaattagttatcttagcagaatgtatgtatatttgccacctcatgtataataatcaaatcagtcctaaatcatgtagcttttgtggtgatatgatgatatacggagtaggacaaggtatatcgggtaattgtgtagatctttgagtgtattcaaagtttggcttttaagtgagcttgtcacttcgtttctctcagctccatttttagtatctataagatgtgactattaaaatctgttctacacacttgtattagtctgttttcacgctgctgataaagacacacctgagactgggcaatttacaaaagaaaatgctttaatggacttacagttccaattggctggagaaatctcacaatcatggcagaaggcaaggagaaacaagtcacatcttacatggatggcagcaggcaaagagagagcttgtgcagggaaattcccattttaaaaatcatcagatctcgtgagatttattcactatcacaagaacagcatgggtaatacctgcctccatgattcaattatctcccatgaggttcctcccaggacacatgggaattgtgggagttacaattcaagatgagatttgggtggggacacaaccaaaccatattaacacctagcaagtgttttatggggatcaaatgaagtaatgttcatgaatatactctgtgagccaggtatggtggtgcatgcctgtagtcccagttattcactgaagtgggaggattgcttgagcctaggagtttaagtttgtagtgcactatgatcatgcctgtgaatagccactgcactcgagcctggacaacatagcaagaccctgtctctaaaaaaataataaaattaaaaatactttgtaaactataaagacctatccaaagtaaatatattcttaatgatgacgacttatgtatttaaagcactgtacagttttttgcatttgctgtaaatatatgatggcaaaatgcttacctagaagtaacagaactgcatgtattactgtgtatctgatatcaatatttaaaatagtgggctgttcttctttaaagaaaaacttatctttgcttatttttaatttccttgttagcagtgggtgcttagtacaatactccaaataatatcactcctgagtttggaacagacataagggaggcaggcatcttcttcgttaactggacctacatcagatgtggggaggaccccccatcttcctctggcttttcttcttttgtcatgttttagctttgctgccaatctccactgatgggtatggcttttttctcattgttggcagggtagtttgcttgatgtagtagtctgcttcataccaacctcctctatcttcaaggacctccttggaaagaaacagctgtgcttcttctggagcaaagtggttcactactctggcctttccaacggtggtggtctctcacttagatgctgcctgggaagcccttagagtcccagtgccacctctacaaggtactctttcatgtgaagacaggaaaacctcttctgtgtcctcatgacagcagaaaaactcccatacacttatcaggcacaccactggtgtgcaagagcggcttgtacagactctcaaatgctaactgttaaatttttaggaagttgtgatcttgttgttaacacaatcattactaattatattatgtaagtgattaatcaaaaagattattttagaaactgtactaaatatttaaaatatcactttcttattattttgctgcattttgttattacctgtgctcctgatattgctttatatctgctgtatttttatggtagataataccgtataatggtgtgctactgcacatctctccccactccacattctttaacttcacactagtagcttgaaattggccatggtgagagcatttctacctctgaaatcaacaagtgccacaaaccatgatctgtcattccctgccatttgttgaacatttaccagcagactactgggctcactgtattctggtctcttctggttctactgctacaggctacagcagcaagtgttccctcattaatagtctctataatgagaaagaaattgcctcttccttcttaggactttttaccaagtcctcccaagaactctgtcatgaagcatttatccagaagtcagttgccagccacctcttctcataggcaccccagtcttgactgattcttctacagtcttccttgtgtttggcccagggagcgttcctgtggggtgagcactcgcttcccttcctttgtggaggcaaggaagctcatcactatcagtactggacttctctgcctggtcctcagggctcagttcagatcagctgggtgtatgaaggtgaaagactatggtagacgtgggtctgccacctcccagcaaacactcaaggaaaattggcccagttttttatgaattatctagaatgtaaagcacttagacttttttttttttttttttggttattggttttggacccacctaaaaattcttgggaaaaaaaaaaaagaagtaccatttaactttgtattataaaaaagactgaaagggtatttcatttacaaaatttatttcacaaaaaagacttttcgtataaatgcatcacattaaacagaaaggtaggaattcctgatgtctaagtgtctagtcctaaactgattttccaaagcaactgagagtttagttggttttggagacagtgtctgtcattctctccctctccctccttctttgccttgccccctccatagctctgtagttgggtctagtttagggcttacctatatgaaagattaagtaaacactctgttcttttctttgggaagttagtgttgttttagtatgtggggagtcgaacactctttaaaataactcatttctagaaaacaaaaaggccaaaaatttaggataagataacagatattgaagatcaatgattacatattaagtctgtcagtgtgattctcttgagataaaaaatccttttttaagagagtatagtgcataatatatttttgcttctatgaacttatttggtttcaataatttaatattgaggctgtctcacattttaaacctagggagaaaacaggttggaaactacataaaattggtgtatcaacagttttgagttgcagtttaactttcactatgctgcttaatttgtcatccataaaattgggatgaatccaaacctggaaagtaatatttgactgtaataccaagccatacagcattgcctgatccacataaagcacacttgatcagttttgtcatttgcacatgtggagagttttctcaggctgagtaactcctggtattggattctaggcataatcatgtcattcttgcttgttggtgccatgaaataattagcccaccatgtaagggcccaacttgatgctgtgcttaagagtagagcctatattcttgattcttgtggaatttgtgtcttatatgaaagtttgcttgacccaccagttgcttctttttgcttttaactgttaatatagctccaaaagctattgcccaaatttgtcaaaattcatatttaaaagttctgctgttcaatgagctagtcactagccagatgcaattattaaaattaaaattaaaaatgtatttattcatttgcactatccacattttaagtgcttgatgcctgcaggtggctggttagtggctactatgtagacagatacagaacatttttcttgtggcagacaattttgctggacagttttgctctagactgaagctctgcacacagtacttcccctgtaataactatagacatctggctagtttttactgtgttacaaacattttgctaattcaagtttggagacaatggatttcataaagaaattataataaaatatacctgtcaatgtacaatgtagtgtttcaccatattatgtaataaaatatcttaagtgctagtttggaaaatttgctgttttttgttatagtgtttttaacatcttttgccctctagaacattattctcaaattttaaatccatataactattgaaaaatctgtataagtattgatttctgcttttacatctttaatcatatgaaccaaaagaaatacaacaatgaatcatctaatatgtttgaacaaaaattgatgggtttttcttttttgaaagttttatttggagcactgagcttggaatataaaataaataaagacaacatggaatttaaatttggatgggtaaaatagaaaatgaagtttagaggcttgatagattgacagatcaagaggggtaaaacagaaactattgctatataagctcaggatgaaatactaagtagagacctcagcctatacataaaaagagatggaaaaactaagaaaatgcatgtttgttttgcaatttaaatttttattttcagatcttagaggacaactatatcattaaatgttaagcttgctaaagcagtattttttaggtgtctttaaagtaacttactacaacttcctatatttttgcagcatcttctaatgtacatgaaagttcagtgaatgtacatgaaagttcagggaccacatgcttaaatactggagttgaacggagaactaagcttgttttgaaataatttttgttgtccctgcttccaaatttgttgtggtagtggttatatgagtcttttatttattaggagattaggaaactgctttcataaatggacattatacaagcatcttcaagaaacatgtttcgcttctccagctccaattagaaaagcggtaatctccatcccagccttctggatggctggcctctcttcctaactttcttacccgaatacctctttataggaggcttactacatgccatttgctatgctagatattgtgggtagcaatgataaaggccatcttctctattttatttttgggcatcctcagggttaatgccgtcatcttttccttcaacaactgcagtggtctccttaacattgtctctgcttctggatcttggtctcccacaaaccacttctcacagtcatcaaaacaaacttcttcagatcataattcagattatgtcactcctctgctataagcctgttctgttacatttagaatgaaatccaatcttttaaaaaatagaataaaaaaaaatatattttaggaagccatgtcatcagaagtgtaatccagagaataatatactctataggtctaaaaaaagattttctaaattatgcaattatattttgataaatacttataaatattcaaatacagacatcagtaaaatgaaaagtgaaactcatttcacccatttcattcaatttctcccccaagatgactactgttaattgggtctatatagtttaaggcctttcctatgaaattacgtccatgttgtacgtttgctttacatatgttatggactggaaaatgaaagcagttgtgtggaagggttcttatgttacagaaggaagtcacatttttttagtttccttttaactttctttaaatgaaaaggaaagaatgttttaagttatatcttcaactgctagaaaggtagtatacttagaatttttatggccctttcctagggatttatgattttcacataaaagaatgaaaattgaacacacactgaattatacttctaaaacatacttgaaattttttgcctctctctattcgtgttacttaaccagtgcaaacttactgtaagtaacgaaatcattgaagaaatacacagaaaatgaaagtaatccataatctcaccttctgctttctagagatgactcctaatattttgacaggtggcacatacatatgcatgtatgtatgtgcatatatgtacattatatatgtgtgtgtgcatgtgcatattaaacttgatattcagtggaatcataatacataatgttttggtttccttaattaggttattgtgaaaagctttcctcttcatattctatttttaagcaacctgtcccaatctgacaatttctcactcttagtttagtggttttgagctgtggcatactggtgttccctgacagtggtattgcaggtgttgaaaaatttgtagtgtgataacctagcctatagggtggagcctggaactatgacagttgtctttttacttcaaggtgccacacagttgttgtcatctcctgtttgtttttcataatataaaagcatttgggaagcactgctaaaaatccatgctttccctgtctccctcctcaaacatggacctccccacacttctcccagcttcccttattacctctctgaggctcttctcctcacagcagactgatcttttaaaaacacatgtcagatatcaggaacttaggaattctaccccatatcctccactggcttctcaatggagtcaataaaatccaaatccagttattggctagctccacgttaaattgtcttctgctctctgcctccctcattcagctttctgatcgtggaatgctccaagatcattcgtatctcaaagtctttgtgcctgtcattccctccgcctggaatggcattacctccatcttcccattctggtctctactcatattttgccttctcagaggctgacctaattaccccgtctctacccttctgttcgttaactcctttgcctccttgccttagcactttggtcactgttccatatgcttgtttagtgtctttcttccatactagcctgttttccatgaagacatcaactttgttttatgtttttcatctcttgtacatatcaggtgctcgagaaataattatctaatgaaaaagtacatatacaatgaaaaaagtacatagcgaaactaacatttttattcagtatttgtttcctttatttcattttcccagtgccttggatttttctggtcagttatctctagtgttagcatgagcacttcaggaagaggtaagggagagatattagccagttaaaccatgcatgattactctgtgatatcagttttatgtaacatattttgatctttttaacatagtcaaatggatgttgtaacacttgcttgatttaacattatattttggtctttattatagaaattttaaggaatttcacataatcactattttcttatagaagaatatagggacaagcagaatggtgattttcttaaaggccttatttcttaaagagaataaaatttagtttatgtataaagaaaatgattttattctcagacactttcctccctgtgtgtatcccctcaaattatcacatttaaataattctcagtggtcctaattgatttctgaataaaatatattctggccatttttctttctcccaggatttattatgagccatgacaataaagtttaggtctatttacaaatcagagaaccttcatatttttgagaactggaactttgaactagattagttgagtatatcatgttggtttttttggtgacacgcagtatagagaaaattaaaaatgaatttccatcacacctatctttgaaaactgaatttagcttaaattgaaaggggtgaaaagttggcattttattacatcatttcacttatcttataaatcttagagtgaagacaatgtttatgacattattttaagtctgaaattaaatttaagtgaagcctttctgagacttatttattttaaacacttgttattgcattttggattaaaaaattacatacacaaatttgttttcctgaatatataatgtgtttgatctctccataaatatgtatgttaatatagcactaaaatctaaatctttccacattattgtacacgtaggtatgcaataaatatttcttgattggttgactaatatccaagcatatttaggcatactattacatgtttaggtctttctgatgagattccagttcttgaatctggttgttgctaccacactgacctttttaaggtgcaaatcacattatccctcatgtagaaccctttaaaggcattacaacaccttcaaaaataaaataaaataaaatgaaaaaaggcagactcctttttgtggtgtagaagtccatgcaagataaggtcccagcttcctatctcccaggtgtcttttttttttttttggatggagtttctctctgtctcccaggctggagtgcaatggcgtgatctgggctcaccacaatctccgcctcccatgttcaagcaattctcctgcctcagcctcccgagtagctgggattacaggcatgtgccaccatgcctggctaattttgtatttttagtagagacggggtttctccttgttggtcagtctggtctcgaactcccgacctcatgtgatcctcctgcctcggcctcccaaagttctgggattacaggcatgagccactccatctcccaggttttaatctcttctgttctattcttcctaactagatgttctacaaaattgcttgtgccaatagctcattatatttcctcttgtcagtcttttgcaaatacaccttatttggtctgtaacgccctctttttttgcagtgttttaaaactgcttggaatcatcttttttttgaatcattgtccgctttcccagatagaaaatagtttgcctacagccgggcatggttgcttacgcctgtaatcccagcactttgggaggctgaggcgggcggatcacgaggtcaggagatcgagaccatcctgaccaacacggtgaaaccccgtctctactaaaaatacaaaaattagccaggtgtggtggcatgcaactgtaatcccagttactcgggaggctgaggcagaagtgcttgaacccgggagttggaggttgcagtgagccaagatcgccactgcactccaacctggcaacagaacgagactccatctcaaaaaaaaaaaaaaatgaagaacatagtttgcctactctttctcttgttttacattattgctctacatatgtcatagaggtttaccttctaaaaggtgtggctctgccttttatccatcttcgtatccctagcggctagaatagtgtgtgctcactaagtgctgggttaatgaaggatgtttcaaaggtcgctttctctgaagtcttgctgttttcccaggtggagtaattttctctctcccctgaactctcatagcgttctaactctgctttatcacatataactgtgctatagttatttcctaccatgcttatctcttctgccacattgtgactctcttgaggacagggaccaaaaattaggtatttctttctgtcagatattagtccagcaaatattagacactccataaatttcttcttgttgaataaatacatggctaattgttcaaatttttaaaaattggtattttatacaggcttatatttttgttttagctggctatctgataaagaaaacctatgaatctacttacagtttttttcttgaaaaggaaaaagttctgaaggaagaaaacctataggattgaaactgtcatgtaacttttagctcagcttggagatcagcctagatgaatggttctcacattttagcctgcatcagtatcacctgcaggagctctgaaaccatggatcggtgggtcccacccacagagtttccaagaagtttccaggtgttgttgatgcttttgttgccaggaccatgttttgataacttttgacctgatctgtcttaccagtatttttcagccttcagcatcttgataatttgttcatactttaatgccgatatgtggagtcagtgcaaaggttaaacaggttaaatatctcctgatgtctttggcaaaggccttctgttttcatagacaacatctaaaatcatttgagtggctctttcagtcctcctaaatcactttatgttagtttctattctatacactctttattaaaggaggcacttggtcattataatgtctagtgctttccctcacttatgactagatactgccaataaaattaatgctttccctcgtctttttcaccatctcccatattgtgttctcaatgaagatgagtttatctctctccatctatccttaaaacctgatttagggcccggcatggtggctcacgcctgttatcccagcactttgggaggccgaggtgggtggatcatgaggtcaggagatcgagcccatcctggccaacatggtgaaaccccgtctctactaaaaatacaaaaattggctgggcatggtggcgggcgcctgtagtcccagctactcaggaggctgaggcaggagaatcacttgaacccaggaggcggaggttgtggtgagctgagatcgcgtcactgtactccagcctgggcgatagagcaagactctggctcaagaaaaacaaaacaaaaccctgattttattccacttattttgttttatatgggtaacaacattggtctatgaatcaggcccattttaaaagtagagtttcaagcctttataattgtacaaaaagttccaaggatttatttctccctagtatttcttaatttctctgcttcaacccatttttactgattgtcggacacccagagaggtcataggtattcttcaaaaagtttgtgatatgaaaaggatgtcgtttccttcttttttttttgactaacttctgaataatctctgagtattctagataaaaatattttgccttaaaatttttagcaagattcttaaagtcttacagacttcatcttttgctgatttatgacacatgaatattttcttaagcatatcgtcaaaaatttgagttcatcttctgcaaagaatcaagtgaaccatatacttttaatgtcttcattttaaatatatgttttaagaaaaaagtcaagacaaatatagatatgcatatttgtgtgtttgcacccattatttttagtcgttctgggatatcttctaaagttccctattattttctcctgttgaacctgactgtcaaacgtattgtttgttacatctcttcgtaaatatttttcaatttcagctgggcttttactagctaaaagcactaacatcataaattatataataatatgtaattatatttgtgctatttaaacgttatatagctaatgatatcactgttcttgactatttgtcttgtaaaataaaacagaaaataaaagttcacaggcgttctatccctaaattcaactaagagtacacaaactagttactcttacaaactttatgtcaaaacctttctcctctcccctccaaccataactaattttttcagtagggaaagttcacaatacttttgaaattacttaattcttaaatcaatattatgtaagtagagaattctctttttacaagaggtttaaacaaaacaattacttattaatatatctgaatttgtgatgtgaaaactcaagtttagcatctggctgaactttgtctgtatgtaggctcatccatttatcttatctcttcactcaaaattaatcatctggtttacttaaaggttgcttttctttgtaagtgcatactgtcatcagatttcatctgttaatagatatttagtatgatggtacatgtaggctgaactactgattttaattttcttgagtttcataagcataaattaaagctattgagagttgtttaaatttgttaagaacagacttactgtgttagtttgaaagcattatttttcaaatatagttgtgcaggtgaagtgatctacttctgctatgtgtaagattggactgttggtgctgaaatttaaaaggttctgcttgtggattgtaggaagacaaatggcacatctctagaagtgaggagaaatagtactgtaattcagtgtcatgttgatagaagtagaaaccttcaccagtcatcttttatttttgtaccagacaactaactataaaatataacccagatggtggagctatgatagtaaagatacagaaatgacattttgctgatgaattttctgctactctttgcttccccactttcagttttataccaaatcttttatggtgtaggttgcttgcttatgtatctaaggacagatccataggatgaaaaatgtgtttaagggcatttttagatcttggattatttcagtaaacttttattttcctcttttaattgcctttttggtttttcctctctttttgctaaactaatattctcacataaattagactgagccatgaatagtgggtcctatttcaattttatttctgagtttcatatttaaggcatttgggatgtattattatgctctgcctgtctgtctgcctatattggaattgggaagcctcagaagagagcaggggtttggcataccttatactgtggtctctagtctcaggcagcttcaccacacttaggccctgaattgaactgtaaaaggaattatggaaaggggctttagtgataggggtgtcagacattaggaatgagcaaggtagtgagtttgtggtactgtttttgtagcacagaagagctaaaaggtgtatctgcgatggcaaaggtcaggaaaggggctaacatttatgagaaacctcctaatttgtgtataatatcttttaatctttacaatggcctcatgaggtcggaactgggacctgagttgaggtctgtggctcagagttggggctctgctgctgggaactgtggtgtgcactgtgttgagtgggtgtgcttgtgtgtgtctctgtcttaccttgagggtctatgtcaaaaccttcttgagaaagcaagtatataatcccttctacccccagagccattttaatgatatagagaatatgcagagaacacaagaactttttgtgggtttattttgttaaagttattcattctcagttcaggttttgggtttgttttcagaaatgagaagtatgtcttagtcactttaagactaagaagtcatgtgtttttgatacatataaacctgcgtcaacatctattctaattaaaaacaccattgataatcgtttacaagtgcaagatttcaggaatgcagaattaatttaaataactagtggactattattataacttcaacatactagcatacactctgaaatgattattgttcattcatttatttagattttctagatacttttagtgattacattagggatagccaactccctgggctaatttgaaacataggaatgtagtatgcttgcatattcatttcagtatggaacttgtgaaaatctccgtctttgggcttttctttcatacaggctacttttgtatgaagtctgttaggttttattttctccttctgatctgtggtcctgactttttacagttacctggacactgccatgtgctttgactgatgttctgttgtttattaggcaaaacacagtatcattcttgaaaggcctgcagttggtggatgctctagctgcttttcatgcaactgcactctggttatacctgatgtcatccctgttagataatgtggtagtccttctcatcatgcaggcaattggtaatgctaaacctcaggatatttttgtaatcaaagcccttgtaattggataaattgatgttttattaaagaatacctggtaacattataaatagtattaacattctaaaattaacttgtcactgtaatattaattacagtgatatatggatacatagaattatgtgggcacgtgtatatatgtatgtgtgcgtagatatatgaaagtgaaagaatatttaaacctatactgtagctcctgctgagtggcagatgctgtaactatgcaaaaggcctgtgtgtattcaggtaagagaatgttggtatttagaatctctggagccctagttactccctgtagatagtaaaatcctgatgcgaagtcttgataatactagtctttctaaggaaccagccatttttaatctcaggacatcttaaggaaaattatgcatctatgagtcatggaagtgctaaggatagctaaaatctgaaattacttaggggttagatgaagaatcgatttgggcttgattatatgtcttaattgccttccatatttagttggcatataattagaaccccctcattactttctcaagaaactcgaaaatcaaagagtttacaaatagtcaaataattgactttagcaactctaaagcaaagagtatacaaatatttcccttgtttagatattttatctatgtatctttttgtgattgcaggtatatatctccttcaggaactaagtaaacaagtaaacaacaaataggaaaaggttaataagaattcatcagtttcagagtctcaaggccttgactaaaggccttttcacactttagactcttagaagtggactattacatgagtcaataggcaaaccagcctgtcttgcaggggtctgacgaagagaagctccttttctctaatatttgctgctgattcttagttgagaaaccataattccaaattgccagtgtctatgagaggagctacagtgagtgacagtaactgctagttgtacattgcacttttggtatcacctgtcagttatgtgtgtcttcatctttatgtatggatgaaaatagaatatgcacatttgaaaagtaactagattctagaattttaagttttcatgtagatactggacttactctgtagaaaatcttctggggcctatcagcagaaatttatgccttatagcattatttagctgttcaggggaggtttatgttttcatgatttctaatatagcttgggaaaattatctagaactttctcaaacaagtgtcattgtattatttcaacacaattttgtgagttcagcaaaaatgagctaaatgtctattctcatatttcccttttaggtaaaacagttaatccactgatactgcattgttgttttctgtgacatattgggactctttgagccctgactgtcaacaggattcatgtggttcaatgatgttgtgaggaacatgacaatccattgccctcagtgagtttatattttactagaggaaataaacatcaaatgtttacttagagttaattatgtaattataatcatcatatgttcatggctatagcctacagacactttttcccaaatattctctaaaagagaagatattaattcccaagtaacttaggtcaatgggtggtgtattagttcattttcacgctgctgataaagacatacatgagactgggaagaaaaataggtttgatagattcacagttacatgtagctaaaggcctcataatcatggtggaaggtgaaaggcacttcttatgtgccttggcaagagagaatgagaatcaagcgaaaacggaaacctcaaatctcctgaaaaccatcagatctcgtgagacttattcactaccatgagaacaggatgggggaaactgccttcatgattcagttacctctcactgggtccctcccacaacatgtgggaattacaggagctacaatgcaagatgagatttgggtgggggcgcagccaaaccatatcatgtgggaaatgtctttgcaccttcgagtttttttttctttcaaccacgtcatcatccttattattaccttccactggacctgaaatcattttgttctactcatgatgaacttgggtaccagcataatttagagttgctctctccactttcaaggctcatcgtcttcctgacgacatcagtatatgtgtggaaagcgcctggatagttttttcacctcaccacttccaaaggtcacacctctgtttactactctggttacatggatgttgtaatatctcacaactgttctaactttatgcatatgtatcatacttcccaagtataaacctatcttcttctactatactcattttgcttagatcatccagtaacttcatggagagctccaatccatcaaaccatctgtctttagctagttcatcaacttgcttatcatcaaatgaaatcaaaatttgatttcattgtgataacttttgttatacaattgctgtttccataaactctttactgacttttattctatccactttttctgggcttaaattaaaaaaaaaatactgtttttttttttttttaaatcacaccacatgatagattttgatcactagaaattcagggttatcaatttcaattgggtccaaatataactggaaattctactactatatttttctgttcagttatctttgttcttctactctgtatttcaactcctttcaattttctccagacttcaaccactccttcttttcactagcctattacttatagctgagaaaattgtagtcatataatggaaacttctttggctaccagtcctagaaattacatttttatgcatcttctcatttcctcttactataaaaaaaggcagagagagcctgtcttacagcctgtgatttggattttatcctgtttcacactaacagttatcacttctttcatgtgtatacacaaatactcgctaccaaattgaattatcctcaatatctaaacaagtttaagtgtttcttaccttaaaagtaataagaaaaattttttgaaagttgaacctttccttgatcccatatctttttctatccttagtcaaatttttctttatccattcagacaaacttcctataaagcattcttaaccttggtgtctctgtgctttcactgtgttcttcattgtccaatatagtttccacttccattcttcatacagaccgctctttctttgggcacttctgatctcaatggcacaaataaggggcatttccaataaccattttatgtagtatttggccagtattgggttcctgacatctcttctcctttagatactcttttattaataagcttttgtgatgccatgtacttccattttccttttgtagttctatatacttaaatatatttttttcatttccctctgtcctcattgtagcctcatcttcctcaatcttatcagagttgaaagtatagggcaaagagagtgaaagattgaggacacatcttgtggaactacaatgtttaaggttcacatggtagaattcaattttatgtgatgatgttttatatatatgcacatatatgtaatgtgtatatacacacagatgtatatagtcttgttatcatttgttgaatgtctactttgtgatagacagtatttgagctttaaggacacaaagttaactacagttcctaaattggaggtcacaccttgtcataacagataaagatacatgtgctttactggtactcatagggttggatctgcagtgtcattctatctttgtgtgtgttacagatgcctattttattcgttactgaaatttgggcataaatatttagaaataggttttgatttgggcacatttgttctttgaaggcagatgtgtgatttattctgaacgttagcaaaatttaatgtttaaatattaaaataaaaaacatgaatttaaggaggtttataggaataaaatactagtttattcatgtttttccaaactgggattggggggttaggtttttagtggagggagaagggaatggaagaaatataattttagtacatgtgtcttttatggctattttctgctcataaaagtggtgccacttaacatagcatgcttactgtgtggcaggagatgtgctaaatgttttatgtgcattatctcatttaatcttccctataaactttcctttatagaagaagaaattgaagttttcattttacataagttaaagttacagttaaagggtacgaactaggccaggtgtggtggctcatgcctgtaatcccagcagtttgggaggctgaggcaggcagatcacttgaggctaggagttcgagaccagcctagccaacatgttaaaaccccgtctctacaaaaatacaaaaattagccaggcgtggtggcatgtgcctataattccaactactggggaggctgaagcacgagaattgtttgaacctgggaggcagaggttagggtgagcccagatcatgccactgcactccagcctgtgtgacagaccaagaatctgtctcattaaaaaaaagaaaaagaatatgagttaaatatatatctgactttggagcctgggctcttaacactatgatatattgaaagaatattaaggggaaatttttttcagatttttctagtatctgtaatatcttgtattacatattgcatatattaattaatcatttcacatataccattcagtcttcacaagaaacccgtgatgtacggaaaggcagtattgtcaagatgagactacagagacccgagttaaatattaataacttgcttgggttacacgtgatagtagatcccaggcttccaaacacccagttcagctttccattataggagacacttcctgtggattcattcagtttgctagaggaaaaagttgtccttgttctctagggtttcccatctcccccaagtttaattcaactttatttcacttatttagttaataatccaggactgttgctggagtagcaaaaatttgattagaatcatcaccttcagtgtttcaggtaatggagtggagtaaaaatggcttagaaagcagagcctgttcattctgctcccaggctggcctcctggaaggtttaaagttgacatctggtatggctttcattgctctcttcttctgggaagcctggttgactgcttgacatcaagcattagatctgacctgagcattagcccaagcacgctttgcgtaattaagctattgagatttgttttccctgacaggacagaagagccctacaaggtgagggctctgttgaagtgataaagctgattagatctttagcagtaaaggaatctgatcttagaaatttcttctagctctcgttaatgaggcaaagacaacatttagcagggaaaatgaggtcactaaaaagaggaactttttttttttttaaataaagaaccaattattttgcctccttttaaatcaaggcctcaatttattgtcctgagtaaagctcaatttaaatgaacacatatgaaactttttctcaggggtgtagtaatcttgtttaaagtacaagaagttaaacaactcaagaaagtgaagctaagatagacctagaaattaaaataatttaatgaatactgacaacaaaactgaaataaccaacaatgatgtgtatttattcattagaatgtcattgttttcaaaaaaatgatttttaaaaactttttttctgtaacttctctttccttaaaccacaaacaagcaaataaaacttattttcctaggatacatttatacagacttcaggtattacactgttgacaatcacaccttttagtttagatagcacctttctatatgctgctatttaatccttagaaaactttttttgaaagctgtattatattcatattatggggttaagacttagctctaaaagtttcaaatctcaaatttatgtgaatcctcaagaatttgtaaacaagagggcttggagtataatacagggtttttttcacccctgagaaagtggtctgtaccagagttgtctcaagttatacattatttaaagtttttaatactattttctatttcttgctaagcccttgttccagtatttacaaaatgacatgggaattatgttcccaccaaatacatttatgtgaaatgtaaatcatatgcacacacatattgcacaccctcctgtgttcatagatggccacccttccatcatgaagcattctgcttaccacaaagaccccatcctccatctcactttcagcttattccagtaaaatcaattgtcacaaagggtaaacttggagtagaaaagaagtaatgcaggtagtttatgattgggacagatggaagggagatgagccatccattccagcggcttaccttatctcattgttattgactttgaggtggttgtagtgtgagaatggaaagggtttaatggaaccatgctgccatcttgtcaatataatgtctagtcagtgtgctagttaaaatgaaattcattttttaaatttaaaatttacttaacattttagacttttaaaggaaatttaaactctaaagtctacttaaatgaaatactctgtgtcttctttttcttgagaagcaatgtagtaaagttttcaaaagcaacctagaggcaggatgactcaggccattcccggcttcaccacttgttagcttttgtgccttggttcaattacttttctttaaaatgaacatgaaaataatacctacctcgtgtgattgtaatgaggattaaatcaatttatgtgtgtgtatgtgtgtgactgtagcttgggacagtctactttatatagtaagtgcttgacaaatgtaacttattatcagcccagtcaatcaaacttctcctcctccaccagagtaaaaatgtcctggcagagtttaccaaatacctaagagctaaccccaagtgatgcttattagtttcagtttctcttgacctctttcttatgttagatattatttgcctttacctaggtctttttggaaaactcagcctcccaaattttcaagttgttgttctatttctgcagaactgcaccaagctttcacagttttcacctcctcctgctagaggttttcacctcctcctactagaggttttcagtctgtactaagctagaaccatagcctgatctcagaattggcagatactcccatgggaaagaataaaatggctggagattattagataacatcagagacgctctcaccttctaaaatgtgtgtgcatctagatgccactgtttacacacgtatctgaaatctttaaattattgttattgtaatatgcctggcctttcctaatccttttattaggagtgttgacctgcttgaaacctcctggtaccaccaccctttctttcttaaccattcgatgttggctttatatccgctggtggccttttcagtcttgactttcatttccagtagttttcttctcttatttatcttcttatgccatcttactcaccaatcactttaactttcaaattagtcgcttattcccttccatggagttatctgatatccttcgtcagataacttcgaaatttatacctttattttaccctgataatcttctcttccaaatctatctatctagttattacttaagcattttccactgtgtgttatcataggcaaatcaaatttgaaatgttcaaaacatacttcattattttctccctcaatttgtttccttttctgtatcactagtcctgagaaggaatcctgacagcatcattcacctagtagtctaagccagaaatcattgagttgtcctatatttcacaactgagtcagtaagttctaccttctctgcttccttagtattatttttatctttcctttttcttctcatctcaccattcccactacttctagcatattgacttattttttctctccatatcatctttcactttatagccaaatatgtttctattagaccaatttgattatattctattcttactttaaacatcaactttcattacattttaaaaaatgctttgcaaatactccaaaataatgtatgtatccccatgaataaaggaatcaaatacaacattgaagagctgaatgctaaatctgttttctcttgaaagtcacagcacacattattattgttatttttttttagagtcagggtcttgctctgtcgctcaggctggagtgcggtggtgtcatcctacctcactgcagccttgaactcctgggttcaagcaattctcccaccttagtctcttagtctgtgaagtagctgatactataggcatgtgtcaccacacccagctaatctttttcttttcttttcttttctttttttttttttttttttttttttagcgacaggctctcactgtgttccctaggctggtcttgaacttctgggctcaagtactcctcctgcctcagcctcccaaagtgttaggattataggtgtgagttaccgcacccagccacagcacacattaaaagaaaggccatatcaagctttgctattgactataactacaaaactgtaaaatgagcttatatttaaatctagaaactttttttttcttaacattcttggatataaaactattgagtgctgtactcctgacctcaccctcatggtatttaaggccttccatgcctatgtctctaatctcatctcttcccttttgagcctttgtagccatagagattatatttatttagttttccaaacatgccatcccaatctttttcattgtatttgttcctttggcctggaacatcaataatctgttggttgacactcatccttgaaaattcagctgtttaaaactcagattatcttactaatgtgttcagtggttcacatactgcttggcacatagtaggtgctccatgtatgttaagtaaacaacaaaaatggaaaaaatcaatatgcgaaagtttacctttaaagagattttctatgtctgcctatatattgcctattcaggatatataacaatacttggtaataactgcttaaaaaatttaagctgcttaacctctgtaacgtaatttttcttcaaattttatattttgatttgtttacctgtacaagagttaggaaattacttacattataaggttaaatttttaattcttactgaacaaaaattagatttacttttgcatatatttagctattcccctccactgtagaaattccttgaaaactattgttgtaaatattttctgtttctttttgacaggtaatatttgaagctgaagtctcaggagggagaagtggttatattgccattgatgacatccaagtactgagttatccttgtggtaggttgtgattaagaattgtatttttctatgtcctttccacacttgccttatattggcagtgactattgattgtttatcacttggtttttgctgtctctcttgttattgttagtcctagccttctattgagttttaaaaggaaactgatatctttctagagtttttgaatcaaatatttttcaaacttgtaactaattgtatacctattaggagattcttttaaattatttcattactgagaacaaaatatacatgcaaaggcagctgttagtaggacttgttcatttttttggcatcattaaattgtctagaaaaacagagaagaatagcaaatcagagttcaacagaaaggaaaatataaagaagcctcatgaagttatttgatctgagttgagggctggggtgaaatgaagagaaataattagttcaccttattccaaatttaggactactttttttctcctctgtcataataaatgtctggctaactcatgaggtcaggagtttgagaccagtctggccaaaatggtgaaaccctatctctacttacaaaaaaaaaaaaaaaaaaattagccaggcgtggtggtgcacacctgtaatcccagctactcaggaggctgaggcaggacaatcacttgaacctgggaggtggaggttgcactgagctgagattgcaccactgcactccagcctgggcaaccacagcaagactccgtctcaaaaaaaaaaaaaaaaagaaagcaaacaaaacaagaaactcggtttattaatacacagttttgttatgcccttagaggcacattgattggttttcagatggtgtacctaaatttgtgtttacatcacagtccatgaaaaacaattactgcatgcattcagtagagccaggcaaaaaacagctggcataaattcagactttgcctatatttcccaaaagcagcattttatagggcccgtgaattctgggttatctgttcagcaatcctccctgagaagcatctataacacattgtaagcagcaggctggggcctcttgtgagggccaagacctgtgctcctgctgagtggttgtcaaactctagtgtgcttcggaatcacctacagctgtggtaaatcacagattgcttggctcttcccctggttctgattgaataggtctggggtggggcctgacaatttgcatttctgattccagtgcagctgatgttgctggtctagagttcgtaaattgagaactgctgctttagttcatgttctaactcaagaattccttattttaaatctcttcctgagaggtaagtcactagagaaagatgtagccagtaagggtcagattatatataccacgtggtggttggtaaattctaagaaaagagagaacaaaatcatctcatttaaagttcaagctgccttactaagttctttcaatctgtagtttaagagagctgtgtttttatctactgtttatttttcacttcttgaatgataggtgttaaggaaaggctttcataagtgcacagaaaatggtggattgagcacaacagcagttttagggtgatacggccctccatgaacttttctttttactcatgagccttagcttttgctgtttatataaatttcctttcaatgggaaacatggatgaggcttcagttttaaaaggtagtttcagaggatacttgtcagtcataaatcttacttatattttgactgcagtcattatttttgttagtctaatatgggtatttattttggattactatactatggttataatggaatagaaaaaaagtttaccagtttagctggtgttctttttctgagaagcaaaaatattcccttgttctttgaagtgctgtagagggttataactattgatgttttttttaaaaaaagatctaactgcttaaaatgtagcctaataagttcaatggccgtgtcactgccagtagtttagaaatcattatatgttttcattatatctttatattaggttctgatttcatgtcaatttaatctcttttggttgctttgacttgtaagtttgtaactgttttattatcatccatatacaacatgctatggcagcagttcagcagcaattgttgagtgctcactctgtagagaacaatactccagcaattatggaacagtaagtaatagagctattgagaaaaagagaactatgagagtcacagaggaaatggtgtcttccggcacaaaaaaagcccctcagttttcttctttctgatgttagtcttggccaaaggtaaaaacactaatgataatattcagctggagaaaagtaacatggcatattttcttcatgtgaaaacaaatacatttttttttcccttccttcacagataaatctcctcatttcctccgtctaggggatgtagaggtgaatgcagggcaaaacgctacatttcagtgcattgccacagggagagatgctgtgcataacaagttatggctccaggtaaggccaagttggcagctgagctaaagagtatactttatgttttaaaaacattgcaacaggactgtttgttgtctcatccttttgagtgtgtgtgtgtgtgcgtgtgcacacgcatgtagtgggacaggctgtctgcgtgagtttaattacagattcatgttagagatttccttttctgaaataaaacacatgagcaaataattaataagtatttttgttaggatctggtgaaacacaattctctctgttatattcaaactgcaaaaaattctgtagatccatttgaaatatgaataagaatgatattttttcttatttaataatatttttaaaactgaatttacaagagttaagtaggagctgtcatactctgataaattctttaaagtattttaagaaacccttgggaatatttcaggaagtatgaattggaagagagccaattaaatttttgagtttgagggttaatcacagatctgaggtgaagacatttgcctttcacatattacttccttaatacatttgtatttaattatgatttaacatacatgttggggaactgtaaatggtgcatataaacagatttaaaagaatctgagataaaactatagactaagaaatatgccttgccttcagagaatttatagaaagtctatctgtcagtgctagggtgctaggggctgggaggagctgagagcagctctaaagccaggaagctggacctaaaacagatggctattgagcgaagtatttgaagctagatgatgtgtaagtaataatattctctgagcacctctattattattttttaggttctctgcatcagaatgaggaaagagatttaataagttgtgaattttaaattcatgagaatgccaatagagaccaaaaaaaaaaaaaaaaaaacaagatgagtttaatttcttcaacataggcatcatgattttttttttactacatcctttagataggtgaaagtagtgttggggataactattagtttgcaggtggttgtaataaaggttataataaatgaatattgaaataataccttgtataatgactgatatgctgggtgttatatttgtgttatttcatcaagttcttccagcattccaattggaggttacaacaggtgtacttcatattaatctaattattactacttttatagcttatttgattttcaagtgtcaggataccatattttgtgtccaaatatgaaaaggagatgagggtcccttttttctgtgattatggtaatttctcctacagagattgaaaaataggataatttttcctggaaagcatgttgtataatgtgcaacctgttttatcaaataaatgtcaagtcagttttcttatttctcttcctatgcctaaataatagtttaaaaatgattttagatatatgttctaatcgttttgctagtgattttttcatttagatgggaacattagctggcatttggctttagttgtgagctatatagtcttttcttggagatctagaggctctgtaggtctgcccttggttttatgcctcaggatttaatgtgacattgaaataaaaagggttttgtatcctcagtcaccagctgccttgtggcaacaaagactttctggaccctgctggtctgagtgggtggtagtcccaatactgctcattttttttttttgtttgctttctattttgtagatagtccatttcatgatggttttaaaaaatgttcctcctgccatttttgtagcaaagatgagaggtaaaatattctatgaaacttctatgttgctttctcccctacctcacctcttttttttttcttttctttttttttttttttttggcgtttgctacagaatggtgaatttatgtatttctcttccactttgacatggacattgcctcattcttcagtagtgtgcatattcaccttaatttattcaaaagctattttacctttttcaataacaccacatcaattaccttaacttattcacttacatcagtcttccccatctacaagaaatattgaaatctattaattactaagggtgttttcaaattaaaataaaaacttttattatgaaattatttaaaaatgaaccagataagattgatcattatctatatatcaatcaattagaaggtggcagtgacttaaaaaacttgctcaacttttgccaaaagtaaaaaaaaacataataaagcaggaagaattctggttccaaagtgaatctaccagctaactcatgcaaacagatgtcagattattttcatttcacgtagaataacagcctagagttcaagaagctcagttctgaattctaacttttactctaaccctcctaaaccttttaacccagttaattgcagtggccttagagatttcatttatgtgttctgggcctcaatttgcttatttataaaaggagattctgaatagacactaaaatcccttccagctgtaagatgctaaactaggtctttacgttatttttggtggcttgaaacatggccttgataacctttttgtgtggaagatgaaaaagtcttgtaattcgttttgcatggggaaaaatggtacctttaagtatcattgtgagaacaaatgctcaaaatatctgctgctagtactgagaatgaatgtacttgaagcactcaatgaaaggtcactgcagtctatccacagaggtaatggaataatacaacagttgttatacctgccatggtcaggtaaaataccaaatggcaatcaactttatatgtcctccaaataacttacattatgtagtattgagcttcaattggcaaaatgttgtctaaatatgggctaaagtaacaaagactagaaaaacagccaattttctatttcaaaggaaaaatgatatactataactctgtgaaaggtgtacagaacacaatgcttgatcatatttgatattttaaataatttgttatggaaaaactgaaaaatttctctcacttctgtattctttctaggttataattaatatatcagtcgtttttgttgtctaaaataatatacaaattgagtaaattgaaaaatgcagggaaaaacacaaacaatgaattgcctgagttaatctaggataatttcataatgcatatcatggtagttctgaaagtatctatagggaatgttctttcttgtaagaattggattatataattgtagagtatttgaagtagatctaccttcttgtacatgctaaatgaactaatgatacataaaacaacatcgaatgtttttataagcctgagtgtcagtagactaaaaatatggtgaaatcatgaggttttctggaaagtagtttttaaaaatatgttatgcggtacatttatgcactaaaagaaatttagggtcgggcgcagtggctcacgcctgtaatcccagcactttgggacgccgaggtgggtggatcatgaggtcaggagttggagaccagcctggccaatatagtgaaaccctgtctctactaaaaatacaaaaattagccgggcgtggtggtgcgcgcatctagtcccagctactcggcaggctgaggcagaagaattgcttgaacccgggaggcggaggttgcagtgagctgagatcatgccactgcactccagcctgggtgacagagcgagaatgtgtctcaaaaaaaaaaaaaaaaaaaaaaagaaatttagaataaagtctttagtcacccttagagaacttccagattatttttcaattgagagctcagtgaagtagcatgtattctggatataaacgcattttttggttaatgatttgtaaattttttccacatgaacagacattttttaaatcttctaagttttagaactaagccattttaattttgtagtagtgttctcctatccttgggggatacattccaaaaagcccagtggatgcctgaaaccacacatagtaccaaaccccacatatactgtttttttcctatatatacatacctatgatcaagtttaattaataaattagacacagtaagagattaacaataataaaatagagcaattataacaatatactgtaataaaagttatatgaatgtgagctcttgtagcatatctttgtactttactcaccctccttaggatgaagtgaaatgataaaataactcataatgagaataagtgaggtgaatgacataggcagtgtgatgtagcattaggctactattgtccttctgacaatatgtcagaaggaggttcatctgcttggggctatcctagatcattgagccatgacgattttgatggttgggatgtcagaaacacacaatgtcgatgactaacaagtgagggatggcacaagatttcatcacgctactcagagtggagtgcaatttaaaacctatgaatggtttatttctgaaatttttcatttaagattttcagactgtgattgacagaaggtaactgcaactgcccaaagtgcgaccttggataaggaaggatgtctgtattcctgaggaacgttcaatgatacggaatttgtgattcataacttgaagctatgataaagctctacttatgggaaataagatcaaaagtgaaattataacatataatttatactgaaatgaaataataaaaagcatttggttatattcttgagaagtgtcaaataattttcttacaggaaaaataaaaattagattgtacacttttataggttagaaatgttggttatttttaaattttgaattttttgaattatttattttcagtattattgaaaatatttaaaattcaaaacttttaaaaaatattcaaatatttcaatatttgcatgtttttaatattcttgaattatttttattttttaatatcaaattattatcaatacatactacttgtacatatttatggggtacatgtgatatttttggaacaagcatataatgtgtaatgatccaattagggtaattgatgtatccgtaaccttgagtatttattatttctttgtgttaaggacattccaattccactttttaagttattttgaaatatacaataaattgttaactatagtcaccctatggtgctactgaacactagattgtaactcttatgaacactggataaagtgattgcaggaaaaagtgaatatataagcaaaaaatgaacatatggtgtagcagttccattcctaagtatttgcccaagagaaattaagacatgtgcccacaaaaagacttgtacaagaatgcctataacagctttattcataataactgataattagaaaaaacctacatgtccatgaacaggataatagatagacaatttgtggctcattcaaacaatggaatactgcttagcaataaaagaatgaactgctgataatgcaacagcgtgaatggatctcagcaacattaggttttggaaagaggacagacacaaaaaggtcatatcctttataatttcatttacattaagtttcataagaaacaaaactaacctatggtgatagaaatcagaacacttgttgcctgtggggaataaggattaattggatgtgggcagggggaaattctctagggtaatgttaatgtcatatatattgactggggtcttgatctatgagtgtacagacatttgtcaaagattaagatctgtccaatttactaattatgtttacctgaataagacacaaatgaggaaaaaatgagtaagtgacacattttatcaaataacgaacttactggcagtgctaatcaagccatagatggtaatagcctacaggcattacttgcgtttttatccatcttgtccatttcaagtgatttgattacattcaaaggtaatttgtaatcattagcctaacttgaaataaacatgttctgagtttctgctttaagaacaccttataacttgaggatatgaaagggttgtaactggggttggactgaaagttatgcattagtattctattatgaaggtccagtataagtggacacctacagggtaaatcaaatagagcctattgctgcaacatctgtcagaccatatgctttggcttcaagttcggtgtagaaactaaaatactaatgactccatccatcattacagcgcttggcaggcctgcatcattgaattgggcagagaaattcaacagtggagttattgaaagtagggaattgtgtgggtagatttggtggcaccatttgttttggtgaattgaaatgaggctgtttaatgtgtgactggtaatcctatgcagattgtcatcaaaactgtggcaattgggccaatctgtcagtaatcgccgcaggtgctggcactgtgcctcctccgtgggcctgccaaaacaggagagtcagccaccgcttcgcccttggtgaggctcatcattgctagaatagtgtgatacagctagttgctcagccaaaggaaatgtcattccttatggagcaacacataatttaagcaatggcttgagagtactaattggagagtgaaatcagtaaaatgagatgcaaattgctctcaaaaacaaccagagcgaggctgaccccctactgtaccaaccgttctcagtgaaggggcagtgaaagcggttggtctaaaacttctgaccacatagtgcgttacctgtccaggcaaattccaaagccttgttcctgtactccatgcaaacatcaccacatggtagtgggaatctaaagcatgatttctaaacaattgagttaattgggaagcacaaaaattttagctgatgaaaacatagcactacaccatttcagaggcctagtagttacggctcacagtgctctttctgatgaccccatgctatagcatttttctatgcttatttatattgccatttggcaagcccagatgtttgcagcatatttaatttctgcaagagattttactatcctgacactatttattttaggaaaaaaaagataattttccacttattataatgaaggtaagcttcctgaagaaattactgcatgcttaggaactgcagtttacagtaggcaattctttggaaactattttgagaggaggtttttaaagtcaacttgattaaatacataatatgtgatcagctcacgctaggtaacatgcataaagaaaaaacaatgcaatgcaatataataaaagttgctctaatgtctggacgtggtcaaagttctgacattttctaggtaaaagactttaagaatggctgacacacttctgaaatattaaaataacaaacagtagcatataagtaccaaaacagtgagtaaacttgaacaatgatgtcagaattgctaaaggcacatggcacaaatatatcttgagatttgtagaagattaggtaagtgacttatttactaccttgtaatgtaaggaatatacaaatggatttaatttcctccttatagatcctaaagtataataatgacatgatttgaagcttatggtgagagctataagctgattataagggagaactttgtaattgtagggctgttgaaaactacaatgagctgctccaggaggtagtaaaattacaattagtccaagtatccaagcataatctgggtaagcatatgctagagatgtagaagacatttgagcctgaggttaactactttttaagatactttttgccctgacatgtgattctataactgtgtatgggaagtctgtatagagtctaaggactgtactgtttcagagataagcgtgagcaacgcggactggagtatttggtgaaatcattagagaagacttgattgaaaccttgaagtgtacatagtacttgaataagcaaaagtgggcatggttactactgcagattcagaaggcagaaagcacgtcgtgtgtatgtgtggggacgtgggataggaaccgaaggagaaggatcttactgaagtggaaggttcaccatgaggagtggaggtaaatagaatttatggaaaagttggtactagaccacggtggagactgctggaagaggaagaggcttctgttctcagtacagtcatcagggaatgagggcctgattccggacagcgccattggcattggaagatccatgagtagcaaaggagaggacaaattaagaaacaaaacgattttgggcctggtttgcaccattttatagaatttgagaagatgtgagagtgaagtaatatagacagctttgtacattttctcagagtttatttttaaaagacagtcaatgagtttgttttttcaatttctagttttggagcgcatttgtctattagaaccattgttttactttttacctctttctaccttcataatttcatgtaagtgttcctcagtaggagtgaaaaatgaggagacatttcaattccttttgactctttctagctttaataaaagtttaccaagacaatttgaagcttgtcgccaacttaaacctctgagtggcccaggtgtcactgaggagaattaatctatgggaaaactgttggtgccttcaaccttggctgcttctgtaacttctggctcacaagacaggagtgtgaggagtgcaaaccatgtcccttgtgctttcctagtttcttgtcacctgctctaaactttagctgatagatgaatagtagcttgctatttaattctaattttctctgcttttgtctaagcagtagtgattttgccatgtatacactggtttacagttaattctgatccacttaagagaccgtgttctctttcgtagctaagagccaacactcggcagtcctgcttttcattgggccattggtatattctaattcacagcattatcttctttctgcatagctttatataaagaattctgcttataggtcttgagataaagtcaccgatctcatatcatggattataaggtttttcttctgctttctggcattttggatatgtaatgatgagcatcagaaagtttaatcatatttactttttagaattgttaaatactcctgaagtcattttggttgattttatgtggcttcctaccgtaaagagatcaatgccttgcagatataaagctttcttttccttctttaataatttataaactctgaatttaatgtttacagattacataactgatcataaatgaataatgcgtataatattctttaccttccttatctattcttggaacaggactatacaagcctggcagtcatggaagttcaaggattgctttttatcgatatctagaaataatttacttctctttctgtgcaagaacaatatgctctcctgtttgcagagctgccccttcagtgtgtttctaggtgtgtcacgtcaagcactttgtaactttcccattgagctcctgggatcagtattacaacatggatcactggcaggcctggtttcttctttatgaaaagtagtctgctagaaagatctaaaatttacaaaattattttattgtaaaataaaacgtaggtatagaataccacacaaaaataaaaactattgtgactcaatatcgggtaaacatcacacaggacaagaaagagagcttgccagccatcccagaggtgccgtccatgtgctctgtgccaggcataacagagctgtctccctgcctctacaaataaccactctcatgaattttaacccttgtagtttttttgcagttatatatgcatccctagacaccatagtcttaccagtttttaaaattagacatctttttaagtcacttttaatctgtaggtttgtcctttattcctttcctcgcaatttatctgttgagcctaggatgtttgacttctagcttcccctgtccacattttgctgattgcatactaatgccctcttcagttccacatgtccctctttcctctccatttcctgcaacttggcagccagatccagggtcaagtttgatcctttggcaacaccataggtggtgtttggtataataacaggaggaacaaaatgtgtcatctttctttttgtgatcttgtcagtctctgatgattaatgcctatatttattcctgggggtagaaaactgtgatattctatcatttttttgtgtgtcttatttcttttgtatttgtttagttgatgaaaagatacatactccccctaatctactatttggttacccaataacacaattcattaaggaaagggaaaatacatgctccaatctttgctatatttactagtttaaaatgagttggttccctatcatcctgcaaagatgacttactctttttttcttttaatatcattatacactcatggatttaaatatatttaatggagtttaatttgttgcaattattatttctattaaatcttaaatcgtcccatatttgcttagtgggcacctctccaaatttgctcctgattctttttgatatgattatagtaggctttgagagcttccttgctacctggtactgtgagatgtttcactttctcctctggatgtgagatcagtcatttttcaatgatgtcctgtttagttttagtaagaaatcatatttcaagataacgatgcaggttctgagagatactcatttctagatcgtttcagtgaatagagctaaaaaatacatacacatatatttaatgataaaatacctaatgagttcatagggatatttcaagttgaagcctaaaggtttttactcaatgtttatcttattacaacttttcagttacattttatttccacaccgatattcttggttgtcagtgacataaggaaggtggatttagaatatatcataattatacattggttttatctcattttattttgaaacttgtactaaagctccattgtcagcatatagctattgcatggataatatactttcttctacttagctcttatttagtctcacttctaaatgtaactatgtttttaatattcaatattagcccacctgtcatatctagtaattttgtacgtcagaaacaccttttttgcatttcaaattccttaggaactgctcatgggaatagtattccctgagttcttagatgttgataatagttttttgtgcccttgattcttaagtcaatttcacagtatatgaaatctttcattcacattttctttaattgagtaacttaaataatgttacttcattttctttcacagacagaataggtacagtcagtcactataaagccttggtgtctgtctgtacctattttttctagatatgcaaataattgtttctaattaatcttaccagaatatgtatcacagtaggtcactctgagatactgtcatcaggtatgtggtattttctttcattatgtagtttataaactttttttttattttagaaaattttttgttgttgttgttgtttttgctttttttttttttgagatggagtctcactctgtcaccccagctggagtgtagtggcgcgatctccgctcactgcaagctccgcctcccgggttcacgccattctcctgcctcagcctcccgagtagctggaactacaggcgcccaccaccatgcccagctaaatttttttttttttttttttgtatttttagtagagatggggtttcaccatgttcaccaggatggtctcgatctcctgtcctcgtgatcaacctgcctcggcctcccaaagtgttgggattacaggcgtgagccaccgcacccagaagttttttaaaaaactatgatttgtagtactttatctgtacccttgatcctgtagagacttctgttttctctgtttgatctttgcctgtcatcattgatcactttcaaatatttttattctccttattctaaacattaaaaattacccctttttcactcattattcaggaatcatctgttgactttactgtagttactcataatttcttttttttccctctctatttctttctttctttttttttttaattagactttaagttctggggtacatgtgcaaaacatacaggtttgttacataggtatacacgtgccatggtggtttgctgcactcatcaacccatcacctacattaggtatttctcctaatgttctctctcccctagccccctatcccctgacaggccccagtgtgtgatgttcccctccctatgtccatgtgttctcattgtttgtctcccacttatgagtgagaactcataatttctagtaattaataatgatatttctttaatttctaattttccttaattgtcatttcatttctgagttttgttgtttaagtttatattgtttcatctcatgaatcatttccgtaatatgttttagcttatcttgaaatattatgttgcggttttgatctgttttatggacatatttttctgactgactttcattgacactaagaattatactctgttccttattttcttttaatcttacaaaatctatatgtggggtttgatcttgatacttttaagttattcatttttatgtgaaataagttttcctgaagttttaaaatgaggtggggttcaggaaactttacctgattttacagatttccctcttctgttgctttgagttatgttttaaaatacggcagcttgccttttgggatttctgggatttccccacttttgtctagtccttctatttccatactctcttattagtcagtctgtttttatgtggcaggttcagaaagattaaaaaactacgctactgccatcagcttcccagaatccctcagatctggtggtttcattgcatttgtcttctgacttcacccaccttccctctcactctataaattgcatggttttatagttgtggactcatatgcatcacgtttccactttctacagtgccgtttgaagcaaccagccaatcccattatgtttctttgtttgtttctttgttcttgtttctttgtttgactaaaatgttctaaggtagcaaatacatggttaccaaaactttgccttccatagatacttgattaggagtatatctaagagtgatattttacatgcctctactgctgcatcatgtagtggactagtagtgtcttctttgccactggcaagagaggttataagtacctttaaatctaatcagactgaaaaataaatttcagtaaacccagaatcagaaccaaatcagaaagttcatccataaaaatctgattctctagaagcacttctggtcctaaaatcatctctgtccctctggcctcaagaaagtaaagcagaaccagtaggagatagatatgattttattgaaatatatatatatatatatatatatatatatatatatgtctatataattataagattacatatagtaggattttatttacaaaattgaagagatttactgcaaggaattggtttatgtgcttgtgcagattggctaggcaagtctgaagtctgtagggcaagcccttggggagggcaggctaaaacatgcatgcacagactgaagctgttgttcactggtagaatttcttctacttcggagaagcctcacccctggtcttaaagcctttcaactgattcaatccagtccactcagactatctaggataatcttatttactagattatggattttaagtccattcacaaaatgccttcacaaggtcacctagtttagtatttaatgaaataactggagattgtagcataggcaagtacacacatcaaaagactgacacagttatcaaacagattatttgcttagatattgtttggattatcatcttcataatattgtgattatcagaatttgctatgaatacctttgcacagcaatctcacagagtattctcatcatctctgttgaataagttggtacaaatacatatacccaatgttagatgaaaaggtagagatttgagaagtaatgagaaattgttcagctcacaaatggttacttcagggctagaagctgggtatcatccccagcagacatggttctgtcacttacacctgctctgtccgtgtggctcctcttattggtcaccttttctctccattgcaaagatactcatgcttcctagggtgaaactctttttcttgttgaatagctgactttatattttgttacacttgattaatctgattctagtatttgctatctccagcacatctttaccctgctttatttcagaattataatattcaccacctctttctctctctgtcaaatggtattcatttaccttcttccatccttccattgccagatagtcaatagtttgaatttattgtcatttcagcatattttttttttctaggagaacactatttacttactctaatgaaataagtataataatttctatggccataaataagaaacagtgcttctctcaaaataataacatagtattttttaattttagaaatttctaaatttaagttttctgtgaaatactttcatgtttttaaaattgtctttaaaatgatttcatgtttttggaattatagaattattttgttcttcaataatggtgattgtgatgatgatagtatctttatcatcctgtgagactgaaaaaaattcatacaaatcttataaagcagacaagctctagtaaggaactctcagttccttgggattaatttggctggaatgttgtaaatttcacgtcagcctcacttggtcgtagttgtgcaaattcactttggaattcattttgacaactcatatgcagtcttcttgatgctgttcaacagggacctaaatatcaaacataagaaaataggctctttctgagtcctacaattttaagaagatgagagaatcatatatcattatgtcaatgacatatgatagtcaatgatatatgaaagtcaatgaagaaataaatatataaataaatgtaatttgattattttcaagtcaatagccttgaaataatctcgacatgtattgtcagtgcagctctttttagtctgaaatgaaactggattgattttattcctcaaactttgaaaagagactctgaagtaaagtgtaacatattttaattataccatatttcttttaggatactttcaagctgaaagtaatagaaaaccaaatgtattatttcatttaacaaaaagtccaaagagaattgggctctagtaattgttggtgtcatttcagagatttgataagtaacttcctctgtctctctgcctgatatgccatcctgagtgcatcagcatttcccttagactggactgccttatggtgatgaatcagctcttccaggttttggcatgacagtaagaaaaagcaaagggaacccattttcttatgtctccttagaagtgaggaaacctttttagaaataacttgaccaattcctatcatatctccttggccagaatatggaccgataccccattttaaaaacatgtcactgttaatggaaagaagactcaggttaacctagtgttaatggcccagtgtgtctccacgtgtaatatcttgatgcagattttgatacaatatatctaaagtgatctcttgactcttcatttgtaacaatctgccagttgatgctgatgctactggtctgtagaccacatggcaaggtgtttggttaatagcctggctggtgaaaatagatgttggagaatcaacctttattaccactatattccaccaggaatgaaacttgtcaaatgaatactgcatgcactgtgcatgatgaagctgacttagtatagtagaggagaggagtgataacattgaggattatagtgacttgcccagggttacttggtaagtgacaagttttatccagcaacttgtattggagacaaaataaatacagaagcctgagatggattggagggcgggatggaaagcaggtaaaaaaagtagtgctaggttataatcccttggatcatatatttgtgtgattcatttttcagtacttctcagaggtgggtatacatttgcaatggagaaatcatatataaaaactcaaagcagaataaagagcctataaaaggaaaagttatttttgacttctagaatttaaatgttttcaattgttacctttagctctaatgaatcgttggaagccaagtaaagaaagcaatgtctaatatagattatattagcccattggaacgatgccttgattaaacctcaatactaaataatcaatttgttggataggaactgtaaccaaaatgaacataacagctttggtttagtttagaggaaagtctgctgtattttaggtcatcaaacctagttttgaattttagtcctgctaacaggctatgtgcatcacatttctaatctttctgaactttaattggatatgactgtatcagaaaagttcataagagagagaagccacagaaccagtaacagctcacataatataaggtacatggaggtgcttattaaatgattattgaagataaacctgaatattatgactgttaattttgttattttatttcaagaaataaatatcacataagtcttttgtactcattaattatataatatacatcctatataagcatatgtatttatagttatattagtatattaatacacacacatataagcatcatgtaatatatcagcttggtgatatcttgcctggatgagtttaagtatacccctcagcctctctgagttgtggtataattatttctgaaatagcttggtgtcagtgatctcttggtgtccttgaaattcaatatttttgtaacctccctttattattaatttggattgatgattaatgtgtattttattataacttaataaaagcctaaggaggatttatgtgactcttgtctctaaaatgttcagtgaatttaattcattttaacaaagtacttgagccacccgctaaataaagataatatatattaaatattatggaggaaaaaatatatataaatgagacatgaaaccctaccttcagaatgatttcagtatacaaacagatgaaaagacattgataaatatatcatagtagaaaagatttaagatagaaaagtcagttaataagtttttataatcttttatagagtttttgaggcagtatccatgaccctgtcagcaggagtagaaagggaagagtatatatgagctgatggaatgcgaacttgaggcagaggggaaggagctagataccatagatcaggtcacgtggaaatcaagtaggaatgtctgcaagtttttaatctccatttttagataacacagacatttttcataagaacaaatgaccgatttctgcaaatgtcagtagttttagaatagttgataagatagtgcaaattcaatattggcaatgcataaacaatagaaagttgaaagaatctggagccctttcaggctagagaatgtctctttgaaatgactcctgtaaagataagggtcacaaaatgaggtctcactgccaatgtagaggattgaaggagtgagagactgaattgcacgggctgttatgattcgagaggaaactgtcacagcacaggaacttggatgttgtaaggtggtaagggaggctgttggggatcactgaggccaaagtgagtttgaggatcaatgggaatattcacaggactgggttagggaggataatttggtctgtgaatattcccagtgatgggaatgatatgtgggcaccctgcgaattccaaaagttgagaggtgattgagtgggaaagtggaagagttgtcttcaagttaggaaccaggaaaatggtagctgtccctgaaagagggtgtaaggtaccataaaatgtaccctcctttgagatagtagtgttgtgagaggaatgccaataaaggtgaaaagatggaataatgattattgagaaggaaacattaaggatactcagaatctcttcacaagagaagggttttgaaaggcatagtgtgagaagacttgagtgggtgtggacatgtgcaagagaatttggaagtcagtacaggcagtgggaattggctagtcgtgcagaagaactgagaaatacatatggcagggagcaaggagagagtttgagaacacacctggagagataagctagaggaagcccagataaggttgtataacaaaagtaagcagcgtggtgggccttccaattaggaagattgtatggaaatgatgtgctaattgaaaaaaacgcagtctgaggtttgcatgtataatttttttttttggtttatgtggtttgtagggaaagagttttggctgattttatggatttatatttttggatataagctgctttttcagttccttattatccaagggaatgagtgggggatcttgctgcaaaaatcctgaaataggttggtaagcagagaaaaattaacaaaagtaatgaataaaaaatagcaaaatcctgatttggatttgatgtccttaggtatttttgtatgcatatgcagaaacatatatgtatttactacataatatgcatatgcatgatttaagatatggagaaaggtatttaaagatacagtgtatttgggatttagaaaattattattattattattattttttttttttttgagacagaatcttgctctatcacccaggctggagtgcagtggcgtgatctcggctcactgcaaactccacctcctgggttcacaccattctcctgcctcagcctcccaagtagctgggattataggcacccgccaccgcgcctggctaattttttgtatttttagtacagacggggtttcaccatgttagccaggatggtcttgatctcctgacctcgtgatccagccgcctcggcctcacaaagtgctgggattacaggcgtgagccaccgcgcctggccaggatttagaaaattattaaagcaatagagtatcctctttattatttactctaaaaatataatttcaaatgtacaaaaaatcatagaaaacaataaaatagccattaatgtaccaccaccctaatttaatagaagttaacagtttatatttttgtctcatgtcatcttatccttaaggaatttttaaattaacatttaaacatgcatacatgtagtactaatcagtggaatgctggaaccaatgagtgccagaaatttgttaagttttcaggaactttgatatcacactgataaactgaagttgctatagtggagtatttacaccccagaaatggacaaatactacaaaatggcattttatgtttcttgttggagaactaacagttccaaattttaccaatacattgctggtttttccttgcctagtttaactgtcccatcgtatcttactgaatgaataaaattcagtttatttatttgctactcagaaatatttggatattttccatatttcacaatcacagataatttagagttcaacatcttgtacgtatctccttgatcccacatacactggtggttcaaatgtggaaacctagaagtagaattgccgggtcctgaggtttatgcatcctcaactttactagatagtaacaaatcattttctaaagtcactctagcagtttacacttccaacaggaatgttatcatttttgtttcccatatatagccctatgaagtgatatttcaagtaatatgaaagataccaggggtagttagaatttcaccaacaagaaatgaggttgtggatcatgaccaattctttctcagcgttgtgggttttctttgtcctttttgctgtctttgacatatagaagttttaaaatttagattgacaatctcatttcatggttgttagacatacactttctcttttttataccctattcacttttgattgagttatctttttttctaattgcatatagaagatctttacgtattctggctatttattccttgatgggtatttccttgacaaatgacttatcactatttgtgacttgttttttcccctttatatatgatgtctttgaacatatagaggttataaattttttatagttgaatttttttcagtcatttcctattagtttatacttattactcttgtctgggatatgctgatatcataaatatggcttccagtatttcattttgaaatttgacaggtatgctttcaaagtttaggctcttttgactaattctctaaaatgtataaattggctgtcattaatgccaaagagagagttgtttgcaaagagtacagattttggtttgactctaaattattcatcattagtttattatcattctgtggccagcacatgctacacatttggaatacagagatgcacaggcaatgctcttactcttctggtggggaaaaacatactacagcacaggcaatacagcataagggctaaaagaagcttgtatatattactctgagagcatgggggcaatgaatcatttgccttggacccattaactctcctgttaattcatttactctggtgtagtagcaatttatggagaactgagaattactaccatagtgtcagccctacaccttttagagcaggggtccccaacccccaggctgcaaactggtactggtctgtggcctgtcaggaacagggccacacagcaggaggtgagcagtgggtgagcaagcattgccacctgagctctgcctcctatcagatcagctgtggcattagattctcataggagcacgaactctactgtgaactgtgaatgcaagggatctaggctgtgagtgcctgtgagaatctaatgcctgatgatttgaggtggaacagtttcatcctgaaatcatcccctcattgttccatagaaaaattgtcttccaggaaactggtcttttgtgccgaaaaggttgaggaccactgctttcgaggataccagtatttacttacattcttttcctgattgacaatggaaaaaaattgtggctcttttgcaacaagaataatttatcacagatattgcttgctaagatgctttatagatttatgaaaatagtaagaacctgtttttaaagattggtttctgtttgcagagacgaaatggagaagatataccagtagcccagactaagaacatcaatcatagaaggtttgccgcttccttcagattgcaagaagtgacaaaaactgaccaggatttgtatcgctgtgtaactcagtcagaacgaggttccggtgtgtccaattttgctcaacttattgtgagaggtaaggtgaaattgttttcacttcacgaaattgcatggctttattagaacaaaagcaactctgtagatattttgattgatttttaaaccatagtgtttctgatgtcaagtcactataaaaaatatatcatcatacaatttctcagaatgtgtgaaggtgaaattaagactgtagtttgtaaagtttttgaagtttctagtaagtgtttgccattgaaagaaatctattttataatgctctaagtggactaaatatatcaaataccttattccacattgtcatcacctcgtttgtattttaactttagatctagttcttcccgtttaaaacagttctgcggatactacttttctttgaagcattgtggcaatgaagtcaaggtccaagtttctatttccatatagtcctacaaattttactggtatcaaaacccaatagtgaattttcactgatgcatgtctcttatagaatcttagaaagttagaactaccaaacagtcctcactaatattcttggatactaaagttactagaagaatgtcagggattatgacatatcagtacatatttgtagtgaatactggaaaagtacaagtgcaaaacacatattacattcatttaagatgtatagagtccctcttatattgtaagcactgttctaggttgtagatattggagatacgattgtaaatgtaatacaatgtccctacccacatggagcatcatattgaattatgttaggcagactatatagacaggtgttaaaaatgtagtatcaagtcatggtatgggctatgaaggaaaaatagacacaaaacgatggaaattgatattttagttaaggtgttctggaaccagtcttaaggttaccactctgagaaggtaacaactgagctgaaagcttaaaaataaaaatagagacttcagccatatgaaaatctagaggtaaagcagctccgttgagtaggatatcaagcatcaatcaatattgacacaaatgaaaataatcgtaacctgtttaagtctcttcgaggagaagtgtgagagactttagcaaaaatatctaaactggggctgagactgtaaaactatcatggaaggcatttgcaagtgagttttctttgagtaaggatctgaaggttgagagaaagttgcccaagtaggggtatggatgtagagtcaggggcaagagaaagaaacaccagcaagcagagaacacagcacatgccgaggcctacgggctggaaggagaatatgagatatgtccatattttataatgcttggcatcaaatatcttttacatatattattcaatattgtcttgtttttaatactttaacctttgatatttttaacgaaaagaaatttgaaattcacactttatgataatttacccagagcaaattaaatctaatgattgacagccagaatagaacccattgtttcttgattcttaatggtgagctcattcttttccactacagttttccctcgcattaccattattggatgatgcgatcaacctcttgtaaactttagtcttggaagactctatcactcattttttaaaaaaactttatagattaaatacgactattttcagtgtaacttgtctgatgtctccgtattcagctcatatcacctgcacaagttcatgagatcccagtttcaattaagaaaatatgatagtatttgacttccgtatttaggcagagaaacaatttatcacatgttcacacatgcatctttgttaagtcccattccagcatctctctcacctgagcctaattttgaaagcctgaaggtgtccttgggtaatcttcagggtgattaatatgctatggctacaggaacgtgggcgtgctattgaattatcatgctcactggatcttctttaccatatatgcgttcacaatttgcaaccagtgaaggagatggtatcttaatagtgtacctagaatgcttttgaataacagtgatgtataatacatagttatatatgttctatatagttatctatacatttttttccagaaaagtcactcttgatgtatttctcaaaagattgtagaagacctgtttatgcttttatccaggtgctccctttatatgtatagtttcttctttcatgcgaacattttctgcctgtttattttaaaagagaatcattttgtcattactggatctcttttgtttatcttaattgataagtagattttattattttatcaaagcctggttttccttacctggagacaactacattacaatgctcttccagcagtattacttgttaaattaataattatttcaataaaatttataagaaagaggatccttaaatttcattgaaaattttgaccttttttttttttttttatttttctgagacagaatctcgctctgtcacccaggttggaatgcagtggcaggatctcggcttactgccccctctgcctcctgggttcaagtgattctcgtgcctcaacctcccaagtagctgagactacagatgtgtgccaccgcacccagctaatttttgtatttttaatagagagggggtttctccatgttggccagactggtcttgaactcctgaccttgtgatccatccgtctcagcctcccaaagtgctgggattacaggcatgagccaccactcccggccttatttttcctttttttaaagaaagtcctgccataagttttgtgatttttatgttggaaaggttgagttgaaagatgatggcattttgaatttgttatccagaatctgctatcattttagaaatatattttgatagttttgacaattttatttttctttcaacacactttaggttgttctatatttaatacgtacaggtgatactttgcttgctgttttatttgaaaaccaatacagaggaataagttttcttgtttgtagagataaccaccaaataaatattactaaccaaaaacatactctcgggggtcagctgtcttggtgttgaaacagtgctgagaattaactgtgctgacaggtcctatctctcattggcacttttaaagctgacatcctgttacatggatacaaaagatggtaattttaaaggaaattttgggggcagtgatatgaatagtctttaataagagctggcatggtattgcctgttgtcaaagatgacccaagggtaagagtttattagtgcattttctcctaaactgaaagtgacagggcatgcttaaggcttttttgttgctgtttgttacaaatgaaaatttcattgcagaattttcatgctgaagagtattgatctatgttttcccacagccagaagaataaaaaaaagtatggagaaacagaaattactttgctatgactttagcattgcttcctgatcattttgaataacgataatgtattcagcttatggaggccaatctctattgacaaagaagtttttatagagatgagatgcagagcagatatttttgctcagtgttttacaaaattgaagtgtaaaaaatttgaaatacaagtcgaagtagtatttataagcttcaaactgaatgcaccaagcttcaaactgaaagcaccaactttgtaatctaattatgctacagattattttgccaatcctcacctcagctgtgatctcctccgtctgtttccatctgtctaaaccgaagacccacttacatctcgaaccagctgacctaagtaaaacttctataaaattctctgattcctacacctcacactcaatttctattgcaaattgttatagttttatatctatcatttttacctgtgaaactacagttacattttaagtacttcagtttgaaagcacagtttttggtttgtcattgttaatggcttgagttttaaattttagtgtcaattactagtcattatcaaaatgctctggacacagaagtatttagttaatattttagtctgttcctaatgaataatagtgacctctagctataaatgggggttagtatcaatcactttacctaaccttactcagggtagttacccaaccttattcagagttggtgtttaacatcataagaaattcaaacagatgtcattccgttgtaagacaatataaactagcttatacataagaatatttactaatttttgtgactgggtagtacaggataggcttcaggatttgttgatcaagtcattaaagatccacgttctttccaattcttcactttgtagtctatgattttggcttctatcctaagccaggcctaccacctagtcttaggagagaaatatgactacatgcttccttggtcttatccagttagggataaagagggcagtacctaccacaactatcaaaataataataataataataataataatgcatcactggttattggataaacagctagtatgtccagtagagagcttttgtacacaggactccagagcgtaaacagtgttactcagaattagttgtttattttattcagataagatagtaactgaggaaataatgtcaagagaaggtacaacttaatcctgaaggacatacagagtttggaatatggtactattggagaagggtgttaccatactaagtcaagtaacagtatgaatcataggtaatcagtaggatcgtagcttatttggtcaatggtgaactgttcatggaatcacttgctttatgtcagttatttactatgcatatgaagaaggaaagcattcaaaacctattagaacttttcagattctgcttttactgtaattgtagtttatgtcctatcagagcctgtcttgttcatctttgtttgcttcagcacctagcacaatatttacatgaagaaattcagtacttttctcaaaatcaacaaataaaattgtttagttgaaatcagaggagtgggactgaccctggcatatgtaggggatgagcaatgaaccacatatttcttctcacctacagatggagtcaagtttgctggcataaaggaagtgatgatgacaattgtggtgtctacaccagactctttcctttgtcaagtgggttattaagggtgacttttcagtttggtgtaaatatttttcatttgaaaaataatattgatttgaccagtattctattccggtactctaatctttttgtacataaaattaaatctgaatttttttggtgtttttatataagaagcaaggttttgctagttggtggctaagggccatggaatttctagcttgagacctttagcaagctgtttaataccatgcagtattgatttttaactagtttccctagcacagcttttaggctcatgaattcatataaagatcctttttcttaatggtgacttgagatcccttttcttctattgtgaaaactggtcatcttgacaggaagtttggaattatcttggagaatgtaatttaaacagctatgttttctaaaaactgaaatataatgaacatttcagaacacactgaatcacatactaattttaccccccaaaacccctaaatatttaaaaaagcccatgcagccagtggataccaaatgtgtcaaatttggaggagtctccaaatctctcatatttaaaaattttactttgctccccttgagtatgataaaagaaacatttggagtctcctctcattcatattatctacttgtaattcaggtgattcagtgttcaagatgtctggtacatatttaaattctaaatgagcaaaagagtgctagatgttcttatttcagatagtatattttggtgcaaccagaaactagacactcatttgaattgttcatatagtccattaaacatacattttcaaagctgaaaagtattaaaaaaaagatagtatctatgtttatttaagagtagtagaaaaattatggcttttaaatctaatatgaatattgactgggacttcatataattactgaaactctacttgatccacttctgtacaccattatgccaaatacttttttctattaattttctccttttctgagtttccttatagctactccataaggatagtaaagtgcagcagttgtgtttgtcagattgatttttttcattttatttattttctttcagtttgtttttaaaataaaaatgcgatgagagttctttccctaaaggtttctcagtttattttcctaggcaatttgtgtgttgagtgggtagggtactggtcactgctctttggagtaaatattgggggtttgcttttgatgaagctttcgtcttaagaatttgaaaaggatcaaagaggaagcagaatcatttgcatcattaataattatttgtgctgaactcaagggaattttatttcagattgttgacagtaggcctgtacacgttttctaagtttcaattctcttctcttggagtttgtgataaatgtaatttggacccatttccgtctaccaagggactcctatctactacatggcccgagtgtcttcgtagtttatattcccctatctgttaatcatttttctttctcttaccccaaaccaaaaataaagaaacagtgtccatttgaactaagattttttagtctttctgggtttatttgcaacttcattgaaaaatcagctagcagcctttattgagttcttaatgaggtaataggcaagtgcatattatgatgttaagtattcaataaagacaaatgccaaaaaaatcgcatacatagtctcagtacttaagaatctcataatttaattctataggaaatgtagaattattgagtatcatgacacagaattttgacttaggttttgattttaaactctgtaagaataaaaaatgtttcctaacaaataaaaaatagtctacctattttctaactgcaatgaaatagcaactatttcattgaaaccccttattaagcactaatttggctttaaaaagttacactgggagagtcttatagaatgttaattgaacagaagctctatagttgacaaattggaatcaatcagtgagggcagggagataaatcagagtgtttagtggtataatgagtaaggatggcaatagaagtgttgtagtgggacattacttcattagtttgagttcttgagtctctcccactctcccctccacttcatcttcaagagagtcattaatagcagggttctctaccactatatgacttacaggtgagtttttgtgtttagtcttgcagttagcataaattatttgccacttaagcagtacatcttttaaaaagctagctaatatacattctgctgaccagtaaagcatgatcaggaacctgactgttactaagaatacaaacatggaaatatatagaaaacaaaaaaatgcataaaatgttatgtagaagccttacaaataaagcaaataataatatgtaattatttattaatgtgtcgatcaaaaccggcttgttcaaagtttatgatagtaccacagaaattgcttgctttcccatctgggttaagataaatgatgttttccctctttctaggaaataatataatctgacaagaattaaaaccaagtataaggtcaacacaaatgaatacagataaataatactttgtcactcctcagcatagattgtgtttagttcatgattattaatttttagaaaaaaagggaaatattgtaacatttcagtattaaaagtgagaatttggggacggagagctggacagaaattaaataatatggcagaaaatatggcggctttcctcaaatataaatatacaacagtctcttcttgtacaggctttactttagctctgatacttgtttttagagaaattatggcctatagatgtgttctcatctcttacaaggtatataaatacagtgacttttacactttaggatataatttatccttgttataggcacataactttcttttgctctccagtttctgttttctgagccctaaactgagaaaatattttgttgtttttctttattgttgcttgatttggagtcatagatttagctatgatgacacagaatctgtccttgtattaaacaacaaaacagcaagtaggtaattacttgtaccttcgttaggaagaaattttacccacctggttatttacgtattgctgattgcccctggattttcattagtcttttttatacatatggagataccatggctactctcatgttgccatgctacctcctccagcagcttcccttcacattaagggggaaaaaaaatcacagtcctttcctgttctaagtgaccttaaatgaaatatcccctgactgccactccaaatttgttctttatcactcacctccttccttgatccacagcaggcaaagccagctcttccgagtatacttctgtctctgggcattagacttcctgctctttccaccctcgcgtattttttcttgaatagatgcacgcttttacattcttattcctttcagctttcttcttattccccaccccccctccccaaaaatacctaaaggccaaatggcaattattttctagtacagaagagaattcattgattttgttttactgttttttttttttcctccggagttatttaggtcaaagtttttgaaagatctttatgtaatgcctactatcagtaagtatatgcataacaagagaatggtctcaaagatttttgtgctgttggaaatgcagtgaatagaaatctgtatgtctgaaatttgtttgtaatatgtatataaatagattccgttattcatattttattgcatagcctttgaatgccccacacttttctttattctcactgccaccacttgtctctgtcaccatcttctctttcgtgtacttctataaaaaacctacttattgatctccctccatgaacgcttaccttctccaaggcagtcttcacacagaagccagagtgactgtatgacacagtaagtcagaatatgctccccctggcactggcagcttcctgttcttgcggtataaattccagctgcctcatcacagctccaaggccctgcttgctcctaggcttttagctgggctcacccccttcagtccttcataagactctcctttgctcactaaactctagcaacactggttttctttcacttgctttaacataccatgatctctcatgccttagggtcttggctttttctaatcaccctgctccttcaaaatataactgcattcataacatctgtctcctccatgagactgatgtacttagggacccctttccttttgctcactcatgattggatctctgtagccaataccatgatcaaagtctagcaggtctcatcaaatattgtcaaaaaaacaaaaatagtgaggtataaagtgccatatgaatgacatgaatttaatgtgtagaatgaggagggcagcctcgtggctgccttttaatggtcaggggatgtgctgaggaggatgggaagttccatcggactcttgatgggtgggtagcatttggatagtggaagataagtaaagggcattctgggtagagggactggcactggaaaacatgttcttgtgaactagcagtaaatattgactgtaacacagtgttttccactgaaaacatctgagatgatcctgaaattgtactttgaggccttactgtggaacaatttgagtgccagactaagaaatataaatgcattgtgttatttaatttgggaacctttaggagttttgaagtaggttacttacatattatctgtctcagaaaaccaggataccagatgatgtggaaaatggtgcgtttttagggagtaagttaagggggctcttacaattttaaaaacttgagatgataagtgataagtgttcctggggggggtggttatggtagaaagaatgagtcaaggatgagagattaggcagcaatgttgttaaagcattgtgtaatgacagtaggaggagaagtcaaaggagacttctagatttttgtttgggatattggataaaatgtggtattatggtcagagatttggaagccttgtagaagaactcatttgagagcatagatgttaagtttaattgtaaactttcgattggggtgctaggaacatatccagttttaaaatctttaggaatgtgggtaagccttaaactaatcatagggcattaagtaaagactcaatacaggatgaattgaacaataggtgcttagtgcatagaaattatttgtatttcctaagtttccatttcatagcctttagcctatattattggaatttttcatgttgtttaactgtggatgaaagcacagttttttaactaaatggaaaatttagaaagagaaaccaggcagttaaatatgatgtcttttttattgctgacattatctgcatataaaaacacatgtaagatatatcatgtggaaagatatcccccactgcttcatgtagattcctgactgtattttggttgtcggttaagtggaaatctttttcctcttctttgtaaaactttttacttcatagaaataaagcaaactctctacaggcttctctactttctcttcagaattttattgctcctgataataatgctcctggacctttttcctacatcaatgttttaaagggttgggagagggaattttttttttttttttttgagggtgtaggacttttggctaacagcatttctcattctcaaagaatgtcattcactgtagtgggtggtttgaaaatatttacttaagggtagataaagagttcccacctgacataatcttcctgtgttaaaatccccactcaatttggcatttctgtgtactgtgcaggattgctaaaaagcagttaccatgatcagactggttgatgcatggtaaagatgtaaagcagggtgtttggaattcaacatggatggtagaaatgcgagatgtcagagaagccatatattaaagagaatttgaattggaaactgaatcccaatctgccaccgagaacattttgatcattttgatttattaaacttttataacaacattcagatggagctgaattaaaacctttagtcttggatagtttatgggacaccaaccactgtgttaccggtatcattttgaaggatctcttagcgtcagtgaaaaggggaaaaatgggtgggtaagatacttaatttaaaggaagttttcacttatattcttgcatctaactttaaatccctcttttgtttgcattgtgtcacttaaacatattttataatttcaacatattagataccttaaggttttgaattttattgtgaaacgtttttgaaattctgattaataattttcagattgaaacactgcttttgtatatatggtacaggctatcttttctttttgtgtatatctgtacactcagaggcatctgtatctgtctatgtttgtgttgctgaggtttatagataaatattcaaatagaaatactaatgcaattttgaagcctaacttgcatgtaaatgagtgcattttcctaaaactattgaattctgtacgtctgattttttaaaaatcaaccatcagcaatcatggatagtcttttctgaacagtagctccataataaagagaagtcaatcactattagagaagcactgtaggtgaaaggcactatagttcacacttgattttgtagcggggagagggtacttagctgtgaatcaggaatgatgcaaaagatggatgagatagagttcaaggagcagtaatgtgagagtccaggacaatcatttcaagctgtctcagcagtaatgatggatggcttggtggtaagaagtaataataccagatgatgaaagatgcatctcagcaccttgagcccgagcacaccatctacctgttggggttctggggcataatgattcctgatttgcaaccaaagggttttgctgcacttagcaacccagatttttggcagctgtgaaggaagcaagtagcatatcaaacactccttcacattgtaaatttaattacctcatatttatgcatagtagttgttgacaggaacttgtaagctatgctaatatggaaggtaatttgttacctccagaaatcactttccatgtgtcttctgatcattatcatgaaacatgataaatgatctagcccatgaggtataaatgaaaatgaaatagataattggattctatgtctacattgtggctggaatagtcacagcaattataattgaatttatctcataaaaatgagttggcaatacatcagtgacctttcatcattttgtgcctatggtattatatgaagctacttttgagatgaacacaaaaaatgtatcataattctttttaaagagtaatctctaacacttaaattttctattttcttgccttatctgcctatatatttttaagtatctagtttatctacagcgagttttaacaattaatactgataatcctttttttatactgagaataaagtgttttgttgttaccagtgccttgactgaatggcttaggaacagtgtaagacactctgattttttttttttttttttttaatgaacaccctttattattagcagcatgtatctttctgctgggtgatggaagtgtgccttcttgctgaatctgtgtgttctctttgattcttataatatgtttctgatatactaaaataaaagagtttgttttaaatatcaccagacttttttctctttaccttctctttaagtcactttaaataataatattttattattgacataaaaaccctatatattcattgatttgattaacatatttgaggatcaccatgtgttaattattggatttattgctaataaaatgactaagatgcatactctttagggggttatagtgccatatgtaactatggtaatatctagttttcaaattataacataatttcttttttctccaccagcctctttccatgagggtccaagaagcaaataaagcttctgtttatgtttttgtatttctaactaagaaagtctattccagattcagttactaacaactatatggaaaataagaagttatctggaaatgtgacttatcttttgaatgaaatatgtcaataagcagggcatgtccctagggacattttctcccactcttatattttttaacttgaattttttttttttttttttttttttttttggtctgtgatgcagattctcactgtgttgtccaggctagagttcagtggcacaatcttggctcactagaacctctgcctcccaggttcgagcaactctcctgcctccacctctcaagtaactgggattacaggtgccccccaccactcccaatttttgtgtatttttaatagagatggggtttcgccatattggccatgtttggtctcaaactcctgacctggacctcaaacaccatcctaagatggtgatccacccatcttagcctcccaaaatgctgggattataggcgtgagccaccacgcctggccttttcttgaaatttcttcactttctttccttttgtttttcttcaacttttaagttcaggggtacatgtgcaggatgtgcaggtttgttacatacataaatgtgtcccatggtggtttgctgcacagattgtcccatcacctaggtattaagctcagaatccattagccgctcttcctgatgctctccctcccccgcatacttccatccaacaggccccagtgtgtgttgttcccctccatgtatccatgtgttctcattattcagctatcacttataagtgcggaatgtggtgtttggttttctgttcttgcattagtttgctgaggataatagcttccaagtctctccatgtccctgcaaaggacatggtccaattcctttgtatggttgcatggtatttcatggtatacatgtaccacattttctttatccagtgggtcatttatgggcatctaggttgattgcatgtctttgctattgcgaatagtgctgcaatgaacacacacatgcatgtatctttataaaagaatgattccattcttttgggtatatacccagtagagggatttctgggtcaaatggtatttctgcctctaggtctctgaggaattgccacactgtcttccgcaagggttgagctaatttacattccaacagtttataagcattcctttttctccacacccttgccagcatctgttgtttttgactcttcgataatcaccattctgactgatatgagatggtatctctttgtggttttgatttgcattactctaatgatcagtgatgttgatcttttttttttttcatgtttgttggctgcctatatgtcttcttttgagaaatgtctgttcatgtcctttgcctactttttaatggagttgttttcttcttgtaaattcgcttaagttccttataaactctggatattagacttttgtcagatggatagattgcaaaaattttctcccattttgtaggttgtttgttcactctgatgttaatttcttttgctgtgcagaagttctttcgttagatcccatttgtcaatttttgcttttgttgagatttcttttggtgtcttcatcatgaaatctttatccatgcctatgtcctgaatggtattgcctagatttccttctaggctttttatagttttgagttttacatttaagtctttaatcatcttgggttaatttttgtatatgttttaaggaaggggtccagtttcaattttctgcatttggctagccagttctcccagcaccatttattaaatagggaatcctctccccattgcttgttttttcaggtttgtcaaagatcagatggttgtaggtggatagtcttatttttgaattctctattctgttccactggtctatgtgtttgttcttgtatcaatactatgctgttttggttactgtagccttatactgtagctagaagttgggtagtatgatgcctccagctttgttcattttgctttggattgtcttggctatttaggatcttttttggttccatatgaattttaaaatagtttttttctaattttatgaggaacatcaatagtagtctaatgggaatgctattgaatctataaattactttaggcagtatggccattttcatgacattgattcttcctgtccatgagcatggaatgtttcccatttgtttgtgtcctctctgatttcttggaggagtggtttgtagttttccttgaagaggtcttccacttcccttgttagctgtatttctaggcattttattctctttgtagcaattgtgaatgggagtttactcagaatttggctctgtgcttgcctcttgttggggtataggactgctagcaattttttcacattgattatcctgagactttgctgaagttgcttatcagcttaagaagcttttaggctgaggtgatggggttttctaggtataggatcatgtcatctgcaaataaagataattcaacttcctctcttcctattcaaatactctttatttctttgtcttgcctgattgccctggccagaactttcaatactatgttgaataggagtggtgagagatgacgtccttgtcttgtactggttttcaaggggaatgcttccagcttttgcccaatcagcatgatattgccgattttgcctgtgggtttgtcatatatggctgttactgttttgaagtcttttccattggtttattgagagtttttaacctgaagagatattgaattccattgaagtccttttctgcatctattgcgataatcatgtgtttttgtttttgtttttgtttttttgtctttagttctgtttatgtgatgaatcacatttatttatttgtgtatgttgaaccaaccttgcatcccggggaagaagccaacttgatcatggtggataagctttttgatatgctgctggattcggtttaacagtattttgttgaggatttttacatagatgttcattaaggatgttggcctgaagttttcttttgtctgttgtatctctgtcaagttttggtatttaggatgatgctggccttatagaaagaggtagggaagaatcccgccttcttaattttttggattagtttccgtagaaatggtaccagctcttctttgtacctctggtagaattcagctgtcaatccatctgatcctgggctttattttggtttgtaggctatttattagtgcctcaatttcagaatttgtcattggtctatccagggattctatttcaaattcaaattgagttgactgaaccacagagatggcaaccaccccttccctggggaactccgtccttcttaggtggacggagcctgtcagcctgtcagcactgtctggctggaattccaagccagttggtcttaacttgtgaagtgccctcgaagtggggcctgcagaacaacactgcttggctccctgtattcagccccgctcctaggagtatgtagtgaccctccctgggaatcccgggtccagagtatacaaaactcctgagtgtctgtgtgtacttaagtggttgctctgctgggacatcacacagctctgtgtattggacccaaggccctagtagcctgaacttacaaggggatctcctgatctgcaggttgcaaatatttacgggagaagcgtggtttccccggggcagggttacataattcctcaccgcttcccctggctgggagtggggcttcctttggcttcatgtctccccgaagtgggccatcgccccaccctgcttttcttcattttccgtgggttgagctgtttgcctagtcagtcccagtgtgagaacctggatatttcagtggaagatgctgaattcactctctgccttcgttcctctccttaagtgccacagatggcatctgcttttattcgtccattttccagggcctatatatcaatttcttcactttccatactcattggtagtgatactccaactaataagattattgttaattttattaatactagtcttgctacttgaagcaagttttacataaatatgaataagaaacagatttgtgagatttaccccttaaatttcaatgattcttactactgtgttactggggtcattatcttgtctctagaaacaatgcatttcctttaagttgcttgactgctatttttaactgattcctgccctaacaagtagcatgatagttattacctaccattttatttaatatttttaatttttaaaatttgatttagtaaaatatatatattttttaatagagatggggtctcactatgtttcccaggctattcttgaaatcctggcttcaagcagtcctcccatctcagcctcccaaagtgctgagattacacgcatgagccgtcacgcctggccaaacctatcattttatagtagattctcaatacaggaacaggagacgtgtgttcctttctaaatcaaatgtagtttatatttgaaactatttaggactaccacacatgtcctttttttagattctgatgtactactgtaaacatacgcacacactcatgcacactcacatgtgcatggatgtgcactcaaccttgatttcagcatggctttgttagaatctaggcagagcctggcataagtgtggtttattaaaagttaagaaattattctgctattgctcttgcatttttcttctcctcttccctgaacatttttcttggattttatgtcaagaattatgaattgcctttgtagcgctaagaaaattttggaagtgttttcaatgtctttaataatatcatgagattctttgagtttcagcactttcctgtttgtagaaaaaataaattacatagaatttaatagcctatcctcttttaaagtcatagtgcttagtaatcaaagaaagtccataagcacctatttttaattaatatgaaaattaaaaacaccttccagggtaggctcagtaaggtaggatcttttaatgtcccaatcatctttgattaagtccaatgaaaattttggactctctgtcccttcccttcccctccctccctccctccctccctccctccctccctccttccctcccttcttcctcctcaccctccccctcctcctccccccctcctcctcatccttcttcttcttcttcttcttctctctctctttctgtctttttttctttttcagaccactccattgacttctcattttcagcttgataaaatagcattagaaaacttttatttatttattttacttttgacagggtctctctctgtcacctagactggttcactacagcctcagcctcccagatacaagcaatctcacctcagcctcccaagtagctaagacgatagctgagcaccaccacactggctatttttaattttatctttatatttcatagagtcaggagtcttgctgtgttccccaggctggtcttgaatgcctggccttaagtgatcctcctgcctcagactctcaaattgctatgataataggtgtgagccctctgcctggcctagaaacctttaaatgtatgctgtggaggaagtttactctaatttgtatcttaagtagggatgtaatctaaatgtctcttcatgataaaagtcaaatcatgagctaaatccccttttaaatgactcatttgcagagtagctccatttctacatttgcttaccttacctagagagatgttattagatgagttcagaatttttctctgaactaacagtggcaatgcagagtacaaataatatcaagacattaaagacctaactttgcatgattccagtataatgttacataaaagaaatatattctcataatagagagatgctctgggaaatgtatgaaccatcatatatagatgaattcaaataagtaattctgaagaacttgtagttagaaagcagaaaaaagtttacttgatgcctttatgtggtataatcacatcacaatatatgtaacatacaaagatggctgtagaactccactgctccttctaacctatacttgatccatctcataggcagaagcatttgaatgcctaaacttttgcagatggctattcttcatgtttcttttgatttcggggattctcttgctttagaagtcaaaagatctggtacattgaagcatttaaggaaaaacatagacgcccatgtttgtgattgatttaggaattttcaagagaaattttgaaggaattagattttgccatacatgctggctttaaatgttaaatctcaggatgagattccacttctacttagtggcccttgcgggggttggcccttgtgggagttggtggattttctggttaagagtttagtttgtttcctccctttccctaccctttccctccctccctccctccctccctcccttccttccttgatatattgtaggcatatggaaaagtgtatattaaacatatagtttgataaatgtatatatagcttgttgaatattaccagcaccccagaagtgctacctcattccattctagttaataacctcttcccccagagtaaccactgttcttggtttataacattaataagtaacaggtatatggcatcttacatatgaatagtttatactcttatctggtttctctcattcagcattaagtttgtgaaatctgtattgctgcatgtagctatgcatcatagaacatcattgttatgaaatcttgttgtgtgactgtgccacaatttattcatttttctgatgatagacatttggttctttttcaccttgagctatttacaatagcagtatttgaatatactactatatgacttttcaggaacagatgggatcattttggggtagcacgtacctgaaagcggaattgctaggtcatagggtatgctgattttcagctcaaggaggtactggcaaaaaattttcttaatttctcatataatttatactccaccttgcaagcataaagtttcacatcttcaccaacagttgacattatcttgctttccatttctaattatcttcttatgttaatacttttatttgttcataagtgcattcattcaacaaatattgattgcactgaagacataaatgtaattcaaaggcaaacaatatacagtccttgccttcaagaaagtcagtaagtgaagagagaggcaaaaaatataggtaaatctcttaccagaaaaagtgcgtttatttcaggctgaagagagtgtagtgagaaaggttttcagaggcagtaataactgaactgaaatttgaagatagataactttgctaagtgtataaatggcaaaaagacactctaggaagtataggataaaggtggaatgatttttattattatactttaagttctggggtacttgtgcagaatgtgcagttttgttacataggtatacacatgccatggtggtttgctgcacccatcaacccatcacctacattaggtaattctcctaatgctatccctcccctagccccctacccccacaacaggccatggtgtataatgttcccctccctgtgtccatgtgttctcgttgttcaactcaaggtgggatgattttaagagaagagtttcccatggaaaacacaagttgttaaatgtgaacatataattggacttgaagagtgataacacatgaggctggacagatgagcaggggacagatcatgaaagggcagtgcatttattttaggaagtttgcatctttctcagaagtttactttcagctgtcttaataagacatagagttctatttatcacctgctgcatcataaaacttagtggcataaaacaataaccattttatagtgttcacagcttctgtgggctataaatttgggtgatatgtatagatcactccagtatgatatttgggtcccgagctgagagtctcaaattgaacagctaaaggtgatttaaactcctggaggctagaatcatctggcacaagtctggcacttgaattgggataatgccactggctaattgaaaattggaaatggtggcacctagaacaagtgttctaggtctcattacatcactttctctgcactatacttgttgaggcaggcatgaggtctctctggattgaaggggatccagcctctcaatgcgagtgctatcagagaatttgtagcgcattttcagaccattgcagtgactaatgttattttgtgcctttatttcatgttctttttgttgtctaccgtaatagtcacaaaaatctatctagtatagtttgattgtcccccctccccagccattctgagtgtaatttgaatatcacctaggggacaccttggtttagagagcacagtcttaaccattgatctctttttcctcacataattgacattggttttataaagaagaaaatatacaatgagtacatttatatctctgtttaacataatttgcatttatatattaaaataaattttgaaagtagatttcaaaatatccaggtacaaattagtgcctttatagtttaagcaaattattatgctgtatagtaatgatacatctagtatacttctctgattaatttccaagtttagtatcttgacatttgttcaatgtcagacttttaatttaaaacctggacatagacatttaaagatagctaatgcatgaggggcttaaaacccagatgacaggttgataggtgcagcaaaccaccgtggcacatgtatacctatgtaacaaacctgcatgttctgcacatgtatcctgaacttaaagtaaattttttaagccaaaaaaaaaaaaaaagaaaaaaacaaaagagattaaaaaatgtaattgtatggcgctggagcaggaattgatacccttcagttacaatatggagatctctcagctatcaacttatattagtgcatcattttacaaaatttcataccaaagaaacatggtaccttcttcttttttctataatgtttaaaatagtagccttcctttctcaattctttattcgtcttacatccactgattgaggtaatattttcaggaatcttcaatatctatgaaaatattagtgccattttatgtcttatggttcttttctccagcaaattttcagctgacctggctgagcgtggaaaaggatagggaatttgaaatttacagaaaagagtatatgaatagtctggattggtagccattttatgtccttattttttaaaggcatggtatttatcaaagtagactaggaagctctcttgttacttaggaacagtagctgtgaaagaagaacccaactccttagctgtgtaattgcattacttgtgctctagaaactattttactagcctggaaatttctcttgctgtgcatgttggattatagaactaggactcccttccagtatttcatattttggatgatatgacttattttgatactatgaatgtcagatgccccattaaggtgtgaaagtgagtgtgttcaaggggagttgaaataaaaggtcttttgctggcttggctgtcacactggtataaaatgtctttgaacaggtaactatttttacatggttaagcatcttaaaaatattattaacttgttattttatcagatgggtctataattattgccaaccttcagcttccatctatttataaaactaggtgtggtgattttgatagcactttgattattgaggacaggtattttggcccctaaaggaatggtaatagaattagatgattaaaatattttttcagaagtccttatagtaaccatattgatagatctgctttaatgcattctcttttttcttcccccatcattaagcctacatattctccaattgcccatgaaaacctgcctttcttagttgaaagacttattagaagtacgtaataacctgtcctctggttcccaggtcatgtctacctgacttttttatatcattgccatcaggatagcttacctaaagtcagtgactccatgtagtgaactcatttctccttaaaagttctgtatctcttaatccaataagacacatgattgttttttgtttaattccaaaattgaggctattttggacaattgctaattaatatcatttgatgtccctgaataaatatatattgagaatttttacgttataaaacttagttggatctatataagctaatgacaaattttctttgctatgaagatctttaaataagtctctgaagatttatgtttttttgatccaaagagaggcttataactatgactgctttggagttagtagtacatacatgaatcctgttatctagtggaattttatatatgactgaggtcttgttccattagttttactatgtcatcacaattcctttttcgtaaaaaagtaaatatattagttgtacatacagggatatgcctggacaagtcatcgtgactctgtaccctacatagacatgtagaaataataggtagataataattcccctgattaacttagggtaaataaagttttgcattttacctgactggaaaccagggtcattgagtggaggatgcaagtagtgtctcctgatttattgcaggtctgagtcattacattttaaaatggtcatcagttgttggtttcatgtgcttaatattgacttcgttatttggtattgacttgaaatgattacaaagtatgtatttataatatgcttgtacgttgtatgttacaaagactcatcacaatggagtgtttagacctggggagtaagttggcaaacttagattaggtttcgttacaactaagtgtcacaaaaatcttctaattacataggtttcaaatttcttaaaatttggaatttaggctgatgacattttacaaatgtatttatattctagatgtggaagattcaggatatttttaataatttttttaaactatatatacatatcacatatatttacatatgtgtatgtgtctgcatatatgtatattacacacacacatctataaatagagattatattctcattatagagattttgcagtaggttttttttaaaattgatatcttgtttactggattcagccattgtgtcttaatatgaaatgaatgtggatagtgttattgtactccaagtccttttgcctataatctagaatggaataatagccagtgctatataatctaggcatattcaacaagtaactgggacatatattgccattgacaaacacagttcccttcctttctccaaccatatattttttaaaaagtctcctagctcttaaaggtgactgatgatgtggtgaggtgatcacctgtttatggccctagacttcagtgaactgaacagagttaaaggctttcctagttttattgctgacttgattgttattcctggaatcaactggatgttcttttcttgaaatactatgaacagtttgagctctgacaaagctgaaatgaggtattaaatgaccatgagaaaaatcttctgtatttattagcttatgagtcattcatagggattcataactttcatcataacatggtttgccaccatgttgactgtagtactgagagaggcttttgtaaagttgttaaaattattgctataattggccgggcgcggtggctcacgcctgtaatcccagcactttgggaggctgaggcgggtggatcacgaggtcaggagatcgagaccatcctggctaacacggtgaaaccccgtctgtacgaaaaatacagaaaaattagcctggcatagtggcacgcacctgtaatcccagctactcgggaggctgaggcaggagaatggcatgaacccaggaggtggagcttgcagtgagctgagatcatgccactgcacgctagcctgggcaacagagcaagactccgtttcctaataataataataataataataataataataataatatatatataaatattattgcgatttatcattctaaaccaattcactacatggatattaatgaagagagtagttttggacaaaatgagacgctactttttagtttccctatagtttgattatgagctaaaggacacataaacttactttttaaaattccatcaccttttcatccaccctaaatatgaacctaaccttgttttagtttctgctgacatctaaaacagtatgctgcagctgtgcctttttatttcaagcaggtaataaagttattgcagcaatgttttcaaatcaaggtgaataaaacgccatggtaatgcataggatataaaattcagtatgcaaaatttgcagtttcattgctgaaatgattcttcttatttcagcactttaggcagcaggaaagagccatgtcatagacattaaatactgtaattctacagatcttgcacttcaaaaactgaatacatatcacatggggacttgagagacaaaatcattgttgaatatgaagagcagcatatttagcatcagaattttctcctaccctgaattaaatttttgttcaagggacacacacacacacacacacacaagtattagtacaattatatacaatttcttattgatcttgtgtattcgaattagttttaaaatatataaatcggtgtgttttcttcacatggaaaatacttaaaacattttaattgatgtgatttgtagaaaagacaaaaaaaattaatgctagaattgtagctgtgcctttttttttttttttttttttttttcacaagctggataaatcatttgattccacttggtcactaagcagttgcttagaatgtgttcttttgttccagtcaactaactcttttaattaaagagtaacaatttgtaggtgctatgtatcagtgtcagggcatttggcttgctacatcgttcagagtgtgagatgttacatcttactttttaagggcttaatgttaacacctgaaaattaaataagtaaataaataaagtttgggtattgtgttctccaagtgtcgattcttacattgaagtgtacattttaaaatgtggactaggtagaatttacgtagttttttccttccttccttccctccttccctccttccccctctccctttctcccttcttctcttcctcccttcctcccttcctccctctcctcccctccccgcttcctccatgccctcccctcccctccccttcccttcccttccctttttctgatatagggtctcattctgttgcccacactggagtgcagtagcgtgatcctggttcactacagcttcaactttcccaggctcaggtgatcttcccatctcagcctcccgagtagctgggaccacagctgccaccacacctggctaatttctgtattttttgtggagatggggtttcaccatgttgcgcaggctggtctcaaactcctgggctcgagcgatttgccttcctcagcctcctaaaatgctaggattacaggcatgagccactgctcccagctgataagtttttcttacggtggcatgggtaactttttttctttggggcattgttaaggcagtcattcattctataataatagtattgaactttgtcaggcgctaaaagaaacactgggaatgtaatgatgagaatgttttgtgggcacctaacaaattgtattgaaaaacaaggataaaagaaaaagctaagtcactcatggtcctggagttccctggtcactgctattaactttttggtatgttttcttttgcttttggtggttgctgattttgttttttcaggggtatgctttttacttttgaaagtgaaaactaataatctttataacttgtgttctgttgagaagttacaccatgatttacctcccattttcccatcactgattattttgatcaagtttttactttacttttaagcaaagactgaaagtatctccttatgataaatttcccaaagtgttattactttacacatatctatttcttgatacataaattattttccaaaaatactgttatcagttcacttgcctgtgagcaattcgtgtagtcacatgcccatttccctgtgtttccctggccacagtcaagccagtgtgaataaatgatcactgccacagccacagagcttgcactctcctcctcaaaattctgctccattgcccttttgaaaaatggaaatataagtgatatagttttaggtagggatacgtggtaaatttattattttcagcattgttaaaattattttctacattgttgagctgttctagaggaacctattattgttttggactagagattttttttttcgcttcagatttattaagttatgattaacaaataaaattgaatatatttaagttgtacaatgtggtcttttggtatatgtatacaatttgaaataattatcaagctaattaccatatatttatcatctcaccatttatttgtggtgagaatatttaatatctactctcatagaaatgttgaaatatataataaattattattaattatacttacctatattatagttatagtagacctccaaaacttattcatctgaacaaattctgtacactttgaacatctctccatttccctacaaactccccgccctgcccctgccctgccccggtgctcctggtaaccaccattctactctctgcttctatgagttcaagctttttagatttcacatataagtgagatcacgcagtatttgtctttctgtgcctggcttttgaataattgcccccagtagggagccactgggagagaatgaagaaactctgtttagctgaatataattaacagtaataaaaatatagtataaacaaacatatataatatcccattaaatagatactttattatttgtaattcttttttccccttttatctaaagttttctacctacttaccactgtgaaatcatgtgtgcttatttcatggttctcagaagttactcgtgtgtgaaatattgtaagcataggcatgggggcacagtacacactctttctttagttcatcatagctatatgcagacaccaatcgaattttcatagagatggtagtagatagtggtagctccttctgattgatacctacataggtactggcataggggcctcaggtcccaacatccaaactttgtgatgtcttagcattaactttatttgaccagtacaagcttatgagccacctgagtaatatgatttgaaaaaggtctccaggccaggcctggtggctcacaactgtaatcccagcactttgggaggctgaggtgggcagatcacctgcggtctggagtttcagaccagcctggccaacatggtaaaaccccatctctactaaaaatacaaaaattagctgggcgtggtggcaagtatctgtaatcccagctacttgggaggcagaggcaggagaattgcttgaccctgggaggccaaggttgtggtgagccaagatcacaccactgcactccagcctggataacagagcgagactctgtcaaaaaaaaaaaaaaaaaaaaaaaaaaaaggtatctatcacttgaattgatgggtttaagaatagattttaacataataaaacaaatttaactcaattctatcagtgtacaaagtaaataaaacttaatagtaatttagattaaaaaatttatagaatttgctgactgcattgtgagctaaaatatgagctaaatttatgatgagttgtttggcttcccaaggaacttgtgagaactgaaaatttgaagtatcagaaaaataacagtgtgaaatcatgaaagaattctcataaatatatctgggttgcagtttttaaactggcagtgtaggagaaaccttattaaatctaaaattttcaaatgtatacttcttattttaacatctaaggaaaagttaaattgtgttgttatacatatgatattaaatgtccaaataaattgcttctaaatatgaataacctgctttctgtttgttatgggagcaaaggtcatctttctattcatcagtaatattaagtttcttgaaatgctcaagaatttattaaattatgttaccaacttgttgacataatttaaaatcatttaaaattattgtaggggtagctgataaatgcctgaattagatggtccaatgatgtctttcttcttcctcttagcctccctcatgtccatttacttgcacttctagtaggtgatggggaagaaaattaaacaatgagaaacactgtgaatttgttgtctaacaggaaccagaactggataaaaattttagtgagggaaattataaagaaacagagtaaaactgacttcaaagtgattctttcatttaagtaaagaaatggtaacaaataaaaaaaattccatctgcagggcaaacattctagtgttgaatgtgttaatagagcagtggactcctgtaaaacatgattttcatcatctctgtttttcccttttacaaaaaatagtaaaaagaaaaatatgggccaggtgtggtggctcacacctgtaatcccagcattttgggaggccgaggtgggaggatcacaaggtcaggagtttgagaccagcctggccaatatagcgaaaccccgtctctactaaaaaatacaaaaattagccgggtgtggtggcatgcacctgtagtcccggctatttgggaggctgaggcaggagagtagcttgaacccgggaggcagaggttgcagtgagccgagactgctccattgcactccagcctgggtaacagatgagactctgtctcaaaaaaaaaaaaaaaaaaaaaagaaaaagagtaaaatatgatatatatataaattattaactcttaaataatctgctactctggacccagctcagaaacttttgtaggtgaagtgttttctgctcacaagcttcctaccaactggagaaaaagtggagttgaaatatctggcaggaggaaggatgagatcatagtccatgtctgtggtaggctgaaaaatgccccccaaatagattctaatccttggaacctgtaatgttccttatatggaaaaatgatgtttgcaggtgtgattaagttaaggatgttgaaatggtgagaagatgctggattatacatatggggcctaactgcaatcacaagcatccatatccatatggaaggcagagggagatttgactacagacaggagaggagaaggcattgtgaacaaatgaaaggaatttggagggacaggaataccagcaccaccagaagttagaagactcaatcaactgattttctcctagagcctttataggaagtacggccttctgacagcttgattttgaccgagtggtactgatttcagatttctggcttccaggacttggagagaatctctgttgttttaagccaccaagtctgtagtaatttgttgcagcagccataggagaataatgtaatatcattgcctccttctgtagtggtaggactaatcttacgatactttatgtcaaggccccattgacaaataaaacccttaggaaggaggtaggattgagaggtatttaatttatctaattgggaaattaaatgtagaagtattttttgccttgacatttactttgttgctgacttttcctggatttatggcttctattttttattctgcattttattagttaactgaattttgctaagtgacacatgtgtttgtaaaataacattataataggaataactgaatgggagtattttttcataatgatttgcttgatttcaagacacttttaaaaattatttgaaataaaaataaaacaatttgaatatataattcgggttttataataggttcagttctagaataatgaatgtaagtcattaattggaagttaattggtaacatcggcaaagtttatcttatattttggggattgcatgcttcatttgatacctcctgtacaactgggatttattcgcacctcacttctgggtctggttgtgtattgttatgaagaatattaatattgctgcagaacgattacttgttcatttgtgaactgattaaaattcatgcataatttattgaaatgaatagaaattttataaataagccccattgttatcaagggcctgaaaacaaaatacatatgctaatataaagctactttttacctccaacataaaaatttaatatgtagtggtatattagcctcattaatgctagattttacatcttaaaatcatgctgttaatcaatacatatgcttttaagcctctcttaacattgccacatttccaaatttgagcaattgctttgatgctggactgcccccatttttggcctgaccatggaaagtgagatgtaaaactggccagagtgaactactacccttctgaccaagtcttgactgattacatcaaacttatttcttcatatacaaacaacactagtgttgaatattaattttcagtgttaaaatgtatatgctatatggcaaaacagaacaaagcaacctagcatcacacagggcttgttggtgtatgtaggagttgagtcttcaaaaattcttcaaataatgcctagtgcacgaatgaataaattataatgtgaaaaagttaaataacatatttaagattacacagctattaatgtgtaagcatttttttcatattaggtttccagactacaaatttttgttttcttttatatatcacttccttaaagatagaaatgttggaattaatgttgtgctttactgtttcacttatttctcttctttctttcacttgtttcttatgttgcggtatggctattttttctttccttcctctctcatcttttgctctcctcttaggttttctccttattttccatagcaagagtgtgcagagttttgattggtgagatttaccatttgatatactcacataagttcaggtttcagaatatctataaatttatgattaaccaaggtttgttatatataattcacttggcatattgtgactgtttattctatccctacactggggtagcaccccagcgagatgtgaatttagcattctttccaacttaaattagttagtatatgagccatctggaatgaaaacaaatattgcacatatgaggcaactcagtttattcacaaaatacagactgcttcttaaaatatgtgcagcatttaggtaatctcggaagacatttacattttttctattatgttcacttctcgattcagtttcattttagtttagggtttgagaatatatcaactttctccctctctacaaaaactttttaaaactctgagtacaaaagttgttagagcagttggtaaaatttcatggtatgaaatgtctagctctgtctttcatagttgataagtgaaaattctaaactgtgtttattttattcaaacttttttcttttgtgaataacttctccgttgaattcagtcgtgaaattggaaagagttcacttactatgcaattttgactacatattgttgaaacaatttgcaaactatcaggaatggatgttgtagttaaagtttgtaaatcatatgttaaccacttttctatagaaattataaatgtttgcacttcatatagcatatgttatcatctttgatcttagttttgtttttgttttaaacatgagcccagtgaatcccaaggtcatgtggttctacaaataattagtttaaaagttactgccataatgagccatgaatacttgtgaggagttacttatgtccttcaagtgattttggacaaaaaatattgatattacattcattatttatcagtcttctttttgtttcctatataaatttcagtttaaaataatgaattcattgatttctttttactatgtctcccctacaatgttatatggatacccaatgtgtaggacagcctaacaattaatagctactcaattaatatttatcatatgaattttgaaagaatcttcttgaaaattactttagcctgtgtagctgtacagaccagataatcttattcctaattttaaggttatttgtaattcagaggcttttaagctagaaactatacttttatacaatcagggttaaaaagaaaatcctggtctgcacctgaacattcttgtttcatttaaacctgcataagaaggtaaaacctgtctacaggccttatttgcattgtatatttttcatgcaatgcattgccattgaaacaaaaaatccaactagaaagatattgattatgtgctcatgacttccctctatttgtaccttcttcagtccaccccgtacctgtagtgggttggactgagggagcattttgtggttgtgttttaatagtttatgtgatttgctccaactcttaaaaaaagttttaaattaatttttgagcaattactactttattaacactttctttaggtcttttgactttcctgagaaaagtgagaagtgttccaggaattcaaagaactttatgagttattatcccttgtggaaagaccatatgaacagagctatagctgttgagtccttcataaagttcggtgtctcatttcagtcacattgttctaatgaaagaaaaaaaaagtgccttaatatatcattcaacttttctgtaagtacaaatgttgaaataatgttttccaaagtttctttcaagcagaatatcttaagatatccaaaattaaattatagtgtgcctttgatatttgagtttaatagttggtgaattgccttatcttatgctgctcccaaagaccagtgatgtttagtgatttgtgattgtgcctaggtgtaaatttaaatttgtcacactgtgaggcagatttgtagaaacaagttagcacctggcatcactttctgagttcggttatgttattctttcttcctttactcatctgtagaaactgtgaagaagtaacaaggaaagcaaaaagaaaaatacctcttgggcatagtttgtgaatgaaataaattgtcaaagatcaactctactctcttagtagctaattagagctatccatatctaaatattttctttttatttcctttgtatactgtgactttacaagttgatctcctgaaaaaaaatgtgtttttaatacaggaaaattatgttaaaatagtcatatgcacttgcaaaattatatgttctttaaaagtacagttgtcagatcatgcgtcttctagttttctttcaagtatttattatgcatttctaataaatgatccattaagcatttaggccttattagacactaatatatctttgtattattttaaatcttactaattgaagtgcacactcatctctcctagaaccgccaagacccattgctcctcctcagcttcttggtgttgggcctacatatttgctgatccaactaaatgccaactcgatcattggcgatggtcctatcatcctgaaagaagtagagtaccgaatgacatcaggatcctggacagaaacccatgcagtcaatgctccaacttacaaattatggcatttagatccagataccgaatatgagatccgagttctacttacaagacctggtgaaggtggaacggggctcccaggacctccactaatcaccagaacaaaatgtgcaggtaagactgagtagcagaccttttctaccttgtgaaggaatctagcataagacacattaatacatgcagtgttgaaggttctcattatttgatatatgatatagtcacactattaagagttccaatgaattacataaatcatcaccttgattatgtcataatttgactgatttgaggacatgggagtgcttctctattctcaagccattattattatgaatctagagtccttttttggcatggtagttttggtgagcctgctacatattcagtccaaaaatctctgatagctgtaattgaaagcattattgagagaaaagatcattttagttcaagcaaataccgaatacttttttactacgtggaaattctctccctcagtaattttgttacagtcagtgtaaaggccacatcttataatatggataagaaaagttactctggacaatgcctcgttgagataactattttcttcagaatgtcctgttgttgaggattacctcaggagcttgacacccagctgcagaacacagagagattttccttacactttaagcctttctgttgccttcctcatgactaaaactgagtagtgaaaataatagtgtatggagaaaacacaaaaaaatgaaaattaaaaaattgtatataaccacacatcctggttctttaccatgttataatgggaggaattgttagctattaattaaaagccaataaaaagtttaaatatctaatttacttgactacatttttagtgtagtgtttattttgtcttttgtttcttgagcatctgtttatcattgacagtattgttgggctacccaccaggagtactgagctaccatccaagcaaaacccattcagttacctgatgtatcgtagaacatattttttagtccagcatcatatttatatatcaaaaactcctgctgaaagatgtttactaataggaaatttaacttctcaactattagcctgagacttagatgatagagagtccaataatttgctgattgctgtatatatttatctggttgttgaaaaggagcttaagctagaagatgttgggtaaatttccatggctcagcctaaatctcacaatttgcttttcaaatattctgtatgtctatgtcctttcaatcgaggtcatgtgacaaattgtttctgtgatagaagataaactttctgagggagaggcaagttgaccccataatctcaactagtcagagaaatcatttaaagaggaagcaatttggaaactaaaaattagttcactctctattccaaaattaatatcccatgctaatgtgaaaaattgaactatggagtccattttactaagaatactgcatacatgttttctaataaaattacacttttctacatatacatacatttataatgtacatataaattttaacaattttgacaatttggtattccagtgatttccctcttgacttcctgtgcccaaactactttcttttaaatatctcacctgctttatttttttattttcgtcaaaataggtctttaaaaaattagcattaccacacagtgtattgttaatataatgtaatttttgtttaacttaggaattatttgaaattggttccagatgtgaaagccatggagattgcatgtaaataatattgtgttttgaagccagttatactgtgttaagtggataaaaacatgttactgaatattgatttatccccatacttatgttctgagtggactttggactgtttaagtaaaaatattactataaagtgctttgaagtgttttattctgagaatagccctatctatgtgagagggaatgaggatagttaacttacactcatagctgcttttttgtcttgctctattgtccaggctagagtgcagtggcgtgatcttggctcactgcaacctctgcctcctgcgttcaagcaattctcctgtctcaacttcccgagtagctgggattacaggcatgcgctaccatgcccagctaatttttgtatttttgtagagatgggtttcaccatgttgcccaggctggtcttgaactcctgacctcaagtgatctgcccgcctcggcctaccaaagtgcttgaattacagctgtgagctaccgtgcctggcccatagctgctttctaacttataaatgtcttgatattttggaattatactgtctttttatctgattcttttttctgagaaacatttaatttgtgtattctttgtggcataaaatgctttcaggctcaatcacttgtagttttactcccaacagtattaagtttatttgtttttaaaactatctttcacatgtagtgaatttttatcacatgtttattatagctaattaatgtcctcataaggtatgtctgcaagatttttggggagggaagtacttatagactagattttcaggtagactgcaaatttgagagaaaccatggttactatttcatcaggaatgtctactaatcttgctctgttattagaaaataaagagaagcttatggaagtatatattgtattaatttttaaacagtctataaaaagaaatggaacataattgatatatagtataattaaatacagagtgttagttaggattatgatgtatgttcatccacttcccttctttaagatccatttacctttccccaaatttcaggtcccccagacttgaaattaccaataccactactggcctcagcccagaagttcatatcaacaaaatagaacacagtttatgttaactatgatattaactgaattttagtacagattgcaaaaacttataaatgcttcataatcttgggaaatacctttgagactccaaaaataacctttggaggaagttaccatctaattttgttaaattctgcatgcctaaatactggttctataagaggaactgaatactagatttataaaccattcttttttaattaggactgggactattccatgttacagttgtagaatttgccattaatataatctgattgaataaatgttgataattttaaagtagctattttaatagtccctgcatgttagactatgtggctgtaaaaataagtaccaatcaaaaagtaaattacttacaatttactgtttttaaaattccattttaaggtatttgaggcattgaccttttatttctgataatagtaaatgtttatttgatggaaatctgtcaataaataattttccagcaagtcaatacaaaggttttccttatttataataaaaaataaattttacattttcaaatgtaaatgtaggtttttttgtggccaagtatggattaatgctagtgtagaatcaacatatgaagtgaatgtatcatgatattttattttcacaccaatcctgtgaaatatattattttctcactttttagttggtaaatttaagactcaggaaacaaaaacaaaacagtaacttgtccaatatcagacagatgggcctcaactccttttctcagacttttaacggccttaatacttattcctcttattcctatcataggtgatttttctccctcttataatagtatagcatgagtaaataaaagcacaacaagtaaagtctggaagagatgtacattttaaaaaatagagtctgcatggctaacttattctctgagaaaatataggttaatatttgcaacttcacatttattgaaagcccaattgattagtgcttaactctccaatatatgctgtgttttaaatactttaaacagttaaagtgtaaaagtactttatccttttctgaaaatatcctgtctggttgccaaagctttttgtttgtttgttttccttccaaagtgcattataatcatttggtaactgcaattagttgcttcagggtctctgacttaggagaggtggtaattacagcctccagtggctgaagccactgaagcctacctcatgcttctctaggaacctgaggggtatgattatttcgctgttactttatactctgacccatgctattgttcacataatgtttcttcaggcacttcataaatttttaatttgtcttaaaagggaagtaattcagaaactccagtgaacaatcagagaaagtatgcttgctttttttttttctgtgtgtctatttcctctgggtataccatctggtatagaagctaggcaaatacagtttctctttctcttattaaatggaaataaaatatgccatcatcagaaattgtctgtgttgcatgctttggcaattgcatgttaaaattgctcttttaaattgccttctgcttctgggtaacccattgtggaactgctttatgattaactgacattttagcagcatctctctcatagggaaggtcaatagttcagagtgtccagaacataatacatttatgcagttgggaaaactactctctactcttatattgaagttcaatgctcttggcaattttcagtgaaacagttagatctatgaagcagtgaaaaggagagtgtcttattttaaaagtaagcatttactaaaaatgcattttttttcttgtcccaaatccaaaatggaaggaaaaacaaaacaaaataatactcaggcatataccagaaaccacaaagtgagaagttaaattttagcctttagtctatagcatcatcagcaaaatggtaccatatattgatttttgctatggtttaagatagttatcaatcacaaagactagtaaccgctaacactcagcctagaggttgaaacaaaataaacaactcttctaagagttggttcggtttcacaatgtaaggatgacttactatttgatttaaattgttggcttatatcaatgcttgctttaaatttttttgaaatgtatgagcttcttatatatgatctttatatggctttgtattgtttttgagcaagaaatttaaaaggcaatgctattattattattgaaataaaaaacaaactaaaggtaaaaagccacaggaaaagtaatggaagcagttcttcaattttcttgggaatgtaagaataaaatttcattttagatttcctttttgtgagtaataacctaatttttggtttttagattctgtagagaatacttctgtttgaaaaatatttattcagaaaaaaacttctgttggcttctttctttgttaacagtaccgtgttaattaataggtcttcaaagttatacaaccaatgcctcacacttaagctcctagaagtcactagggaccagacctataaacagaataaatgcaaagtgaaatgaataaaatgagagcaaactgcatgtttttacctcctcgtaaacattaatgatatttttgggtttctgaaaatagatgggttcaggtggatcactggctaactctaggcttgtggtagaactgaggctggcaggtgagctgcagctaagtctaacatgatctacctctaatggataatgtataggtagtcaacacctatacattctgctaattttcaggtagactgcaaatttgagagaaaccatggttactatttcatcaggaatgtctactaatcttgctctgttattagaaaagaaagagaatatattatggataataacataatctaacatgattacctagttgtttgtatgatacagactgacattactagatttgtttgtaaaaggatcatcccatctctggaagctaaggaaggactagaagcagagagatcatgaaaacatgcatatagatagatagatagatagatagatagatagatagatagatagatagatagatgtcttctctacagcatctttctcatttcaaatcagaaacaggaaatccataaattcctggaaaatattatcattcataataatcaggaaggttacttttataaggggattttaaagatatgttataagtgaataactttattgtttgaattacttttcttattcaaatatgtgaattgtccaatattaatacacatgaaaaaaatggtataatacattatattagaggggaaaatcatgagagattggagataaattcaagagctactgtgtatttgatgagatgtttaattatttcacaaattttagtgagggcccaagttgtacacatcgccacacgcaggactgcagaagataaaacattgagaagacaacattcctgctcttaaggaattgacaggctagtgttataaccataataaaaatataataaatgatacaataaaaatataacatacttcagtaatccaaagaagagagggataatatctgaccaaaaataatttttcccaaacactattaatttttctaaacagagttggtttaatgcttccgttgaacaaagccatggccttatccataattccttacttgtgaaataatgcataaaacaatgtctagccagtagtcaccataaggatggtttgccttccctctttcctttctactcagatataggaaatctatatggacagatggaggtattaaaatgaaagatatagttcatattctaatatatatcatcaaagttgtttgtgtttttttaaacctctggggttcatgggaatatagaaatgttattctaaatttctatggaaatggagagacagagacagactgacttataaggtaatcaacacctatacattctgctaatggtctattatgctaggagttcccagcataagagtcatgaaagttgaacaaatatgaaatagccttgcccagtaccttttgggtttcacctcaggagcaggttgtacagttagtcatacatcccaattcaaggcacatttccttataggtggtatcatcagtagcagtgtaattaactttactaatagagttgggttgttttcaccttaaaattgtgtcatctgactgactagttggtgaaagacatttggtaaccagtgttaatgacactgtatttatttattcatagtactttaccacatgctgagtctgttaactgtatcattaagtactctttttattggctttgtttgtttttattgaattttgcataactacaataaatcttcaggtagaaatgatttgaataacagcatcagtctcatgaaatgttctttcccctcaagtcctaggttttttatttgatatcaggaagtagaaatggctttaaaagtaaaatggtatatttataatgtcttaaatgatgataacaccaggagtatatgatgaagaaaatgacctagatagaattttaaagatatagatctaggcatcaaactctaagggatgtgttagtcacaaagacaggttcaagagatctagcctgtgagtttgagacttttctttgatggtgctattggggtcactatgaggtatagacttgctcttgattttctttctctttacctagagaatttacttctgtcttcaattctcacaccctattcatatcttttgttgaattgtgatttcctttctttgttttgaaatatgaaagaaatctctaaatcaggttctgacagatgggtatggataaccatacccatcctaggtattattagcattttgggggagtgttggtcattctgtgcaatttcttgattgaaaaaaatgatatatggatgaatctcattattttcatcatttaatttgactcattactacatggaatcatcagcttaggatctcactttctggtcttcattgtcttcctgcaagatatggccttatcatggctaataattgctggaggataactcttcaatcttctttcctctccaccaacctgaatgtaaactgcagaggggaaaaaaagcatgttcaaaggaaaaagcaaatgagtgaattctaatcccaagtcttcttatttatagtaaactttgtgaactcagtaaaaaatgaacttcaaagggcagaaattcatgccttttatgtcaccctaagcaagatctgtgcaaattcagctgtcactacatatgatatggcctagaaatcattgagtgatgttcattttaattgtctcagccaaatcatctcagtgaagttgagtttaaagaactcatctttcattctttggctatgttattatttcccacttctacatagtccctcaccacaacaaaataataataagcaatcataaaacagtttattattacctgttaattaaattattttaagcagttgctatattctgtcctgttattcaacctacccaaaatttactaaaaaccatatttttgttacatatgaacctataataccttttgctaatacaaggaatatacacacacatatgcatatatatatgtacacactctccttttaagaggaattaattttaaaaatttagataccaccttaaaaattatattagtgaagaatattaaagcagagtcattgttccagagtcctctttcctgcttctccatctctctcctccagctaattttgcatttcatgcatgtgtgtgcattgtgcatgtttggatgttgtgcttttatttggggtggggggcagatactgatttagagttttctttctacaacagccaaatcctttctgtttaggtggataaaatgtgacatgggtgaactagctatccttaagcttgatttctttggagggcccttgctggaagtcccatattctgtaaagactgcatagagcttacgtacccaaattatttttttaaattatgtatatattaaaataatacatcaaatgttgcaactagaatttagaaaaaaactcattattttagaatgtttacaaaactattgtcatttttgtcaatgcactattatttttctctgttcctgggagtattttagttgtaaagtacaaagtatatacagttctatattccgcttattgtaattgccatcatgccaacccatttcctttgtttctacagaacattatcaccatcactttaaatgactgcttaatattctgttggatatatatatatatctgaatgtatgtaaccattcttatgttactgaaagtttggactaactcccgctattggccattgtaaaagccgcagtgaagatcatgaatgtaccttttttccacataactgaaaagttcttgacaaatactattcaactactttttgaaagtattatatcaatgcgctttactgacaccatcaaggccaatcatatggttttagtgcaagtaagtgctttataattaatcaagtccaactcctttattaatcatcattctgggcatttagtctcaatagggaagtgatttgatcaatatcaaacagctattgtaggagaaaaaccaagactatcatttgtattgcatttttaagcttttcttttacatgagtatctcctgtattctagactctgtctaaattactggatattctaagataaaaactctgttctctagctactcaaagtctagagaattatgattacagtagctcacaagtactgagtaattgctgtgtgtcaggcactagtgtaaactcataaatgcaaactgaggctgcctgaatgcatttctgtgttgagctgcccagaatggttagaaggtagacatgcaggttaataattaaaccaataagctgtataatagatgtgcacaaaacatctctaaaatatgagtataatttcatcaagcagtcaatcagtaaaataggtggttatcttaaggtttgagagccagtaaagtctaggttcaaatcttgctgtaatccttactgatgtgcaagtaatttaatgtaatgtttcacttcttcatctataaaataaaaatcaataactgaacctgcccaatttgatacttttgagctatttgggcatgtactaaagctaacaatcaatttattaaatttgcaggaattttgccagctggttgtgaaatgattattttgaaataaatttatatatatttacaagtatattttaaacaaaggaacatgcacttaaacctcctagttattttaatatattataccattatttctattcttgaggttatttatgtttattttatctgtatgttggaaacactatataatgatcctctgatgctcacttattcctaatttttacgctagtggcaacgttagagcactgaaattttaagtgctacaaatgagggtttcttttccctccccactccttcttctttctggatagccacaaacatgtttacaatattaaacatttttccttcacatcaatggagatgactcctgcagagtgcttacttagcacaatgtatgagacataagaagaccatagtaaatattagccattgctacattaaaagtcatttcattaaagatatttttcctctaatattttaaaaactacaaacatgcagaaatctgaaggaattatacagtgaacactcatatgtccaccactataatttacctttgctgtatttgctatactaaatgttgatctacctttacatctttttattcatccatcagttcatcttaattcttaattaatacattaaaatattttatgtaagggaatacattttttaaagaatgaattatttgaatttttattagaatgcttagaataatttgtgttttctaaagatttctctaatgatagtttaagaaaaggactgaaaggagatttcagaaagattagaaggctgctacttcagtctaagcaaaaattgatcagtacttgaaccgaagcagaggagataagaattccaatgaggagacaggtgttgaaagagatttgataggtagaatcagtagaacttggtgacacattggaagtgaattctggcttggaacattaaggtatagggacaggttttaacttgaagggctcaaacattggggaaagttttagaaggcaaatctctgtgcttatttttagaaatgaggcattgggtcaggcagttattttcctgggtttatggttcatagagagggcagacagcaggatatacagatttaagtgtcatcaccatttaattcctcttgcgagattcatgagtatactataatttccttgaattggaaattgaagtaagtttctttcaaccacatttttagaaattatgctcttgtaggaaaaatttcactgtatatgttagtatcttattgcatgaactattctgattactcaagcctccctgctcaagggcagaaactggtaattattttacatagagataacttaaaaatatgtagcagattgttttgtgttcacaagtatttaaatttgttcaatatgtgatttatgaactgtgatcagtttgttgaattgtgatttctgtagctgcattttaattgttccccagaatgggtagctcagagcattatgctaagggcagaatcaaatgtagtttactgttggtttttatcatccaatcccaggcatacttgcaagtaagctaatgtgtgttgagcatatttctatattcgtccctttattgctctcttacttctcattgtccctcaccctagtggttcctggtgctcatatgctgtatatgcacccttcagatgcctccacaggatgacaggagaaggacctgagcatatggccccatgattagcagtgctggtgtgcccattctttggaatatattgatatacctatagttcgtgtgtgtgagagaatatatatgtatatatgctagatatagaatatatgtcatatacacacgtatgtacacacatatgtacatgttacacacttatatgtacgtgtgtatatgtatgtgcatatcatatacatacatatatatctagtatatatacattgatatgcatatatctatagtgggtgtgtatatatatacacattatatatatacacacacactatatatatatatctacatatcagtattactttgatatcttactacaacatccaattagaacaacttatttttaaaattttttatcaagttctacacttgagtgctttggtaatgagcgaaaataattaccctgattttttaaacccttgagtcagaagcctctgtaggacaaacttaaatatttagactttccaaggattttcagtagcacaggggagataaagcacctatctctctttcagtgaagagaagaaaataaatgtttctaccctttcagattttactggaatgttattataaactaaaaagtaggtcagcaagactgagttgttttattaagaacagcagtacaaatatcatctgaagaagatgactgtacaattgcctattattaaaacaaaggtagggaaaattgttagtgattcattccctaagctgttccagtccttaagtatgatgctaattatcctgggtattaatttgatttctacttttttagctgatctcctttatctcagtgataacatttttataattataattttgtaaataaccagtaagcccatttttaaagctctgcttagtcaaatcagttattagttgtgtagtgaaaagattttcaaaacattctccagagttggttgatcaatcccttattttttaagaagacgagttagaagtgcctcaattatgaaattggctctaagagagtcaaatttggaaatctaagcttttagaaacatatttttgactgaaacatgtatacatatacttgtaataataaagttaaaatggggtaaatgttacctttatcttaaatttaacatcaagaattgatctaatgaagaaattcatccagaatttaaaatattcttctataaaacaatagggcatacttacagccctttaatatacaaatcatcagaagtctctaaataatagagaaatcaatgtctacttcatgcagcacaacagcaaaacagagctgctcccttattacaaacagtacataatagtttaattttcatgggactagtaacgcatttgttatatcgtggtttttagtgaggaatattgtatatgtcttcagttaaaaatatattctcagcttggacaggtggtacttaaagagtctggagtgagaaatggtttggcaggataacaaggcatattacaagtgcctgccttgaaaggtaagaaagagagttagacattttccattactacctactgttaaggtgctcgcattatcccctaaacaacctcatgcttgtggcaataatcatgcactgtcggttttttgtactaatatgaaagtgcggttcaatctttttgacaaatactgcatcatttctggcttggtgaatttttgtcactcaaacctagttgatgtgtaagtaggttgtgacatgctggctgaaatgactttggatccactgtattgaagaaagtaaaattttacttgaagtgtttcttctttccatttctcactcttctctctactccacctagacctcactccttccctgagtttagattcatcctacttcctttgtaaggtacatcattatacattatatgggagaattatcttatagtgaaactgaaggaagcttttcatggaaatgtgtaattcgtttattattttctaaactgtgtatttgcacgtgtatccatatgcatcactgcacaatctaagtgttaacagtttttttttttttgctttcttactagggcttatgtctaaaaatgctagtttgcaatatctataacactagcattttaaagtcattcataatctgtcaattgatatgaaatataaacattctgcctttttactttcattattttagtgataaattttgtactgcttaaatgttctctgcaagtctgtgtggtttggaaggaattgtcgttttaatttcttcttctttagtgacaacatgtgcatctattatggaaaaaaatgaaaggtaacaacagttgttaatttaagagatgaccatgaattctcagtgctagctcccaaggtggcactcctaagaaagaggtcatttctcaagtaaataatatgccaggtaagatctgtttgcattttaaataaagtgattgatttaggaaatattacctttagaaagtgcaagttcaaatgaatagttttctttaaccccccaaataagattataaaggaattacccatgtcatgagttttttgttgttcttgttgttttaatcattgtctcctagtaaagtaggctttgctgagtaaaaacatagaaatagacttatctattgatggataagtataatggataggtataaattaagcgtagatgtagagacaaagatgtagctatcttccctgtcacttatttgtggcctgcaggggagttttaactcatccccaacactcgggctcccacaggcagtattcaggatctgccttggtctgttttgtggtgtttgtttcatgaagtttcttattaggctttgtgttattcaaaattaaaattttacatacgatagtccaactaataatttaggaaatcatattgccattattaaaacttgctcacagtctaatttaaataaaatctgagtaaaaacaaaaggaagatgcctactataatttgaagatattcattcactaacgtttcaacatttattttgtcaccattaatttattttgtttttcaaataaaaagtaaactgtattatcccatatagttctggaaagtgcctggtgtttatcataaaattatatatattatttgtctccattgtaatagtggccttaaaataatacacacacacacacacacacacacacacacacacacattaaaaaaataacatatttaagtgggaattggaaagaaatgcttaacaataacaagatggttttataaattatgttatgtctatgtattaagcattttttagccattaaagttatttgtgtaacgtcttaatccaataatgaacataatacaatgttaaatgagagaatcaaggtatgatgaaataacaataaaaaataccctatgtgatacttgtggagatcaggaaataattgtatgggtaattttctcatctattaactttatttcaagtcatttcattggtaaaaataaatacttttaaaagagaaaatttaccagaaagaaaataaagagattgatctatagcaataagcatgaatttaactaacacatggcttacttaagcttctttgttttttttcttttaaaaataggtttttctaacttaggcttgggtctgtttattttttattgtatatgttaaaatatacaatgtgttttgacatacatgtagatgctgaaataattactatagttaaacaaatttacatatagctcaccttccatagttatccttttgtagggtgtcagagcacctgaaatctactctttttgcagtgctttcagtttacaataggatattattaactatagtcttcatgctgtacatttttgtctgtctacttaatgttcctaacctgactgcaaatgtatagcctgtaaccgattctccagatattctccccctccctgctctctgtttctcatttgacttcaagaaaaaaagattccacatttaagtgaggtcacagtattttctgcctgtgtctggcttatttcacttagcatagtgtcctccaggtttacccacgatgtcacaaatgtcaggattgccttttttagggaagaattatgtagatatatgtcacaatttctttatccatttatccactgatgggcatttagcttgttttcatatcttggctattgtgaataatgctgtagtgcagcggtccccaaccttattggcaccagggaccagtttcatggaagacagtatttccatggactgaggaggtggcaggggatggtttcagggtgcaacgctgctacctcagatcatcaggcattagttagattctcataaggagcacacaacctatttaaaacattatgcacagttcacaatagggtttacgctcccatgagaatctaatgccgccacttatatggcaggaggtggtgctcgggtggtgattctcccttgccttccgctcacctcctgctgtgcaacccagtttctaacaggctgtggaccagtaccagtgtgtcactaggggtttggggacctctgctgtagtgaacatgggagtacagatatctccacaaggtgccaattgctgagtcatatgatagttatccttttcattttttgtagcacctcaatgctgtttttataatggttgttcaactttcatttccacctgcaaaagagaacaagggttccttttctctaccacctcaccaacacttagggctgtttatattttgagcaaagtcctttttcactttcatttcaatcaaaatgcaagaaagaattaaattgagctgccgcttatttgggagatgtcacaagatttacttcctaagagtttgtgagaagaacacattttctggcatttgctgttgatccagaagcattttcattgcagtgactttgtttggagattttaacttctaagtactactcttattttgctctgcttttaggataatgttttaaataagatttttaaagtttctcaaaactgaaaacattttacctcagagtagaactcagttaaatttttatttaaaagtaggtttttggtaacagtaaatgttttgacaagtttttacttaatggttaataaaatgctactaggtcaggtgcaggaagtaaaattagtcctaaattgaatttgaggaaggcatgtaagtagaagtaatattaagaaggtgaatcatcagttgtatgatagaactgttactaataaatacaacatgtggtaattgcaagaattaagttcatgaaatgtctattcaactttacaatcttgccctactagagtatttagtcatagggaaccttactgtggttggactctgcctggcaatgcagtttaacttaaaattatctaggaattatttttataggaaattttgctaaaatccacctagttatatgaagtatattactcttgagtagcaaccaagtaactcaaactgtaatttaaccctgttaatggagggaagtaatatggaaatactaaaattgacattttacaaagttgatcccagtatatctcagatgaaaaaaactagaataatatataagaaaacaattttatacattccttttgttcaatttagaaataagtcattacagatatcttgcatggcaaatattaatgcaattaacttttttaacttctgagattatttttaatttaaacttgtatgtttaagatttattttgtttgtttagagtgcttgccagcaaacgctgtgttaatgtaatcttaactattaaaattggattttttttctggctgtgtacatatttctgtcattttgctttctcatcaaccagttaaaatatttttttttctgttcatgtgagtttttcatttatatttatgtataaggcacagcacaggctgtgtttcaagtaaaatattggactgattttgagggagttttttttgtttctatcatttttagtctttttgaggaagttgaatatttttccagaagtgctatactttattcctagtactttccagatgatattgataactccaggaacactaggaaacagaaaacgtaatatcaatgttaattttatagaatataaaatgttattcaactggcctttattttatttacatatttacatagggatatatgtgtaatttacatcattcctaatttcaagaataattctaagttatttactaaagcacaaaaagatttaacagaagaatactaagttgataagtaattttgggaaaaatagtgatactaaaggtaaaataaatgaacttgggggataatgagagtaaacaaaaatttatgtttatagagttttgttactagaggagagtcttatgttattagaagacaccatagatttgatgctaaatgtactagtaataaaagcaaaatctgtatcaattactacagtatttattatttataatatagcagctaatgcttaccagccactcataacattctaaaaactttgtccagcatttgatacgattatcttatttaattattgcaatgaccctgaggagtcctgatgttgttatattttacatttgcagaaacagaatctcaaagaagttaagtgcctttcctgagatcacacagctattagctggttgagctgggaagtctgagtccaaaatctatgctcttattcacagaataaacatttttaaggggataaaatattaataaatcagaaaagcataccttgtcttaattctaaagataagaaaaaaaaattttctgttgggattatgcttggttcaaggataaagtggagcctatctaggggaatgtccgtaatgcataaccttcaggcaatccttgtgaatatctctttgctctttgttgttaccaaattattttgtcttaaggctatgagaaaattgactttctaaaagctgtgtctccgatgaacagttaatactaaagccaaggggaagacgtactggtcagaattatagtaactttatccttacatatatctagaagaaatactcttgtaactgagagctaaatctagaaattcttctgtcatgcagaattttgataaatgtccaatgctatttttagttttaaatgttttttacgtatatgttttatttttgtatcatctttcacttaactattgaactacagttgttctgtgatataaactcttacaaacaatatagatttggctttagtttcattaatttttcataaatgcttgagtattcatagtaccttatgaatttatgataaatttattacagatttattcaggcagagacatatttgaaaatttgtaatgaggaaaaaaaatcatcttatgaacagctccataattttactttcctaattgtgtgtaccttttgggtctattttatatttatttaagtttatattggtatttatatattcatataaatacttattacatatttatataggaataatgcgaagccatggttaacttcataatccagggatgcaggcttaccaaaagactgagacctcatcataggatagaatgattttccttctcacaatataaaaagtaaagaaaaataaattaaccaaaacctctctcatgcaaaaagaaaacattattaacttttggtgaaattcagacatctcttcctgtgtgcatactgtatgtaaagaggaaaaaggggaagaattaatggttggataaaataaatgtacacaatatactttatatgtattacttcctaataaaaattatttcttttttatataacaaaattggaaactaaggtaaaactgaaataattactgttgattagggaaaactttcccatcacatgtgtttctgtcatttcttttgtttctcccttgatttaggttttttttaatgcggtaggccaaagtcttaggtgatttgatattagttttagcataatttgcacacatagaattcacagaagatataatttcatgcaaacatgtaaactttcaactgtaaaatttgtatgaaggactgttatgtttgctatgatatggggagaccatttagtcaatgaggtctttgtacttccattgtgataatttagatagcttttattttctgaaatgtgtttgaaaatgtggaaaatattttaatatttccctggtttttttggctttcatgctaatatatacatacattctaatgtatattatattccatataatgtatattttctgccatttttcaagtgttcttttcccctggcctttcttctaccctccaataatttattaaatgtttttaatctccccccccagcctgtaatttagttttgtgcattttaaagcagtattggttatatgcacttcagcaaaccagtttatgccagctaaagattgaaaaggagaaattaatttaagatttagttctgtgttttttaaaacctttttaaagatgaagatattgatcttgtattactagtattgaagcaaactcatattgtttagttccttatcataagttagaggcgttggagggttaaagttttaccaaagtaaatcataatagaactggacaatttaatagtgatgtcatatacaaaagctcaattaataatcctatacaaccagtaggtgaagattttattttattaataaagcatctgaaaatgagcctagggtcataacttttaagaactaggattatagggtcatgctttattcatgaatagtagacatgctttctctatagtgagctaagctatacttctgaacttgaatgattgtctcagtgttacctttatctcagattcatcattcatattccttttgaaatatctttatcttggtatagatatttatgtgtaaacacaatagttgctatgtaatagtttctgtttagccattaattggagatacgtaattagagttggtgctggggtatcttctagaagaaaatgagaaggagtgagggatttgggtgtgtcaaaggaagataatggagaggacttgaaagaattcttctaaaatgagaattcttactatgcatgtccatgaattgtatttaggccataggagaacttgtacaagaaaataaaatatgtcccacttcactactctctaatttagcatttcctttaattgcaaatagtccacaaactacaatagtgttagtagcaacaatgacttcatctccaacaaacattgcagatattcttatatcacattacagatgtttcagatagcttggaatatgatttattgttcactactttgaaattacaatatttattagacttccctctattaaatgcgttggtaaagtaatatagttatgtattatagtttctgttggaattctctgcattttattttaagcattttttaaccttattctcacaaacggactaagcttcagtagactgccaaagggatccatagcataaaaaatataaaaccctagctctaagaagtaagctaattcagctttttattaacctttattctattccaaatgtgataacatttctccattttatctgccaccatgcataaagttataagggaaattgcaaaatatttttctaccaagctacctattttatattcagattattttagtattaagttcatcttgtaacatgttttaggctttggaagattagccttaatgtttttatttgtcaatataaatttatattaaaatacatattattaatacttatttctaacatattatttattattttcagtgcactgtgctaaggattcacctccattattgcattcaattcagcaacctcatgagcttaggtttaatcatgcatttgtatttttatagaataaatctacccaagagaatggggaaaatgaaaaattgttaactaatttaagcccatcccagtccaaaaccagtcgaaacatctcaatgaagtaaaggtagaatgataactgcatttacaaatatttcttggtaggaaaaaagtattttattctaataaatagaaacatgttaagcataatgttattcatattaataatgaatattaaacattaacattaagtattatatataaaacattaacatattaaacataaataagtagaaagttaggtttcattttgatcttaataatttaagagtaacaactggcacagtgttcaaataagtagcacctagaattgtgctaatcacatagaaaaacagaaaacccgaaggcacaaaagcctatcagtgttgatgtccacattgctgttttccaagtatttgactaccgtctctgagcaagattctctacagatcttatcaatatttgtagcttcctgcaatttgttttactactcaaagtttacgattaatggacctctccctaatagatttaactaagtatgtctgctctttctttcattaattgagcacatgaagtatgtgactcattcttaagttgaaatactgccttcagcaaggatttgacaatcaattcaatcaattatttctaaatatatttggatttattgctttcatctcaggctctttctgtatatatgaaaagtgttaagacagttttaaggagtgcatgagctatacccacattctggctttcccaacacatgcagacatgggaaggcccaaaaagaggtcagtgtcctctcattttctctttcatgcacaaatgtataaacacacgcaaagacacagaggacaaaacaagataaaatggagtaaatttagattttaaaaaatgtaagattcagttcactggtagctgtattatatatcatacatttttagcaacacatgtaagatttatgtcttgaataatataaaaaaaggttcatctgcttgtaaaatgtaagtcttatagttcaacataatagataaacatcaaaactagtatcctcattaggttgtataatggtatattgccacttactgttatttaaatgtcatccccatttcctttttgtagtgctgatgttaaccttgtaagctctaaattgtctggaagttaatggtctgttatatgagtttcatagttcttagtgaaagaatattagattatattatgcagtttgaaatgtaacttgatctctacctcataatcataagtaatgacatagtcttggttgaaattagggacgtttgctttttctgctgatgctgtccatagtataaatgataatttttatttttttgttttaaattgacaaatatgtttatttgtccattcattacacccaagtttatgagggttagaaaagagaacaaatataagcatataagagtacagtgtacttcttgaaaatcaaactttgaaatttatcttattaaagttggtaaattcagaagcattatattctgtcagcacccacatatacccttgtctggctttgagagagttttatttttttaattttataagagttaaatttgaattggagctaatgtaactgacaagagggaaatagaagcaattggcttgcactaaacaagtttgaatggttgttaatgtgaatgactttcaggcagtgaatgtcagagaacagtagattactttctttacctcgggcattttaaaccatctcctgtggtaggattaacataatttctctctctctttcttgaatctaggaagcaaagtaattggagtctggtaattttggcctgtgggtgatgaagataaatcataacaagctatggaatacacattgacaattcacatagggctactagaacatgaactttcagtaatgcattaaacaaatattgtttctttctgatttatattcaagaaagccacagaactgttaattatgaatgcagttatcgtttgttatttttgactaaattcacatgcaaaacaaattgtttcaaaatataagctattgtgttcttaaacatgggctaagaagttgtatcttttatatgattttgagtgatcatatttgtttaaccgaaattatttgagattttaaaagaatagaggtggaagagaatacaagaccatctggtctagcccctctccttaaggcttataaatgtatacatcatcttgagcagatggaggtgtactcacctaaaattttatacaaatataggttctacagttccattcaatatcttattcttgaatttggtcactaaagcattaaaggatcctattttatattcagattattttagtattaagttcatcttgtaacatgttttaggctttggaagattagccttaatgtttttatttgtcaatataaatttatattaaaatacatattattaatacttatttctaacatattatttattatttgcagtgcactgtgctaaggattcacctccattattacattcaatttagcaacctcatgagcttaggttttgttgtctccattacagatttaggaaagcaagagtaaggaaagttaagtaatgtggccaagcacatggctaatgaaaagagttgctataacttaaatttctggactaaactttttcctactgatctacctcctcagtgttaagagtgcaaactccttctctcttagggcaaaatttctgtcactttgttgttcatccactttgtatcatcttatagtcctcttttctcagctaatgggagtatatctcgtgtttttgaaacttttgttcattatcatccataccagccattttagaatttgtttcctaatgtcttctgatgaaatttttaataccacaaatatgctgtgtatctgtttatgtatgtgtataaaaagagtagtattttttgtcccctctaagaatcagtttcccccttggtactgatattgctcccttttagaatgaatgtagttatcactattactgtacatttttgattgcataagtacataattatttttacttaatatgaaatgttaatttgttagagtatgaaaatattaaaatatcaacagtaattgtcctctttttaagttacgtgagctttccaatgccctgaaatgagaataattttgaagaagaatatagatatcaagatataaatgaagtttaattcttttataacaatatgtaatttgtgctactaaagaaacctcaggatgtaagtaaacataatcctgcccattttacctgtttttagaccttttgctaaattttttgtttatccaaatatatgccatcttaccataaatctgtattcctctctgttttgacatcacaatctattgccatggaagtgattgatagcttacatttatcttcatgtcttcagagcaggttcataaggagactgtctggaagaaatagactttattggtaccagcacaagcagacttttagaggtcctgtacaagtttacgtccatctgtattttttttttaaatacaagagttgcaaattggtactttagaaagtgtgaagactttgcttttcattctgtaatttccattcaaaaaccatatttgattatgattctttctaaaatattcaaataatgggttttccacaactttcatactttaaatataaaatgagcttacaacccgtgagtaggaaactgtggtaatggaacatattcagctttatcatgttatgcagaaatacagcagttaggaatgaaacctcattgataggttcttttactgggaaataaaccagaaggtgatgaaaatcacttggcatttttatatgtagtttgtagaaagttcctagtctggggctttgatctacttcattggatcaaaaacataataaattgaatcttgaaacttgctatatccttttggaattacacctaatattgaattattcatgtagatgaaactgatcatttaggtttcagaatttctttttttctgtaatggttccagttcttttttgcatgaagttttttgttgttgttgttttatactgaattttacaacccttcagatataaaagaggcatttctgtactgtctcttgtcactcaaaactaattttgatttcattgactaccccatatatgttcagaaactaaaataatttcaatatagtcaattaattaagtgaaggatttttgacccctacaatgattttgatctgtattagtcttgaggaggtaagaacttcaaaaattattacctgtgagggagcccatgacaaccatcacattttcatgtacatacagaaaagaatgatactgtatataggagtaaagtagaggaattaaacaagcttcctattcaaatgaagattttttaaaaagctataactattaactgtttgatgaaggttttgaaaggaaacgtgaagtggccactgtgcagatatggtttgagtgacttaacgggtcaagtatttgacaacagtaatgcttcctgtggtttttatatgaaggaaaaaatgaaaaataggaaacagaaaccagaagtttatgtaaacctacataaattaactcttaaatgatttattttattttgaagtgtctgtgtattgtggatgaaccaaacgttcagactttcttccagtgctcttggccctcctctattaaatgtgtgtcttgttccctttccagcgtacatacagctcagtcagtaggaactagacagagaagctgttcacttaaaaagttgtcatttccttatagatactttcttttctttattattatactttaagttctagggtacatgtgcacaacgcgcaggtttgttacatatgtatacatgtgccatgttggtgttctgcacccattaactcatcatttacattaggtatttctcctaatgccttcactcccccctgcccccaccccacgacaggccccagtgtgtgatgttcctctccctgtgtccaagtgttctcattgttcgattcccacctatgagtgagaacttgcagcgtttggttttctgtccttgtgatgtagaaagctgaaactggatcccttccttacaccttatacaaaaattaattcaagatggattaaagacttaaatgttagacctaaaaccataaaaaccctaggagaaaacctaggcaataccattcaggacataggcatgggcaaggacttcatgtctaaaacaccaaaagcaatggcaacaaaagccaaaattgacaaatgggatctaattaaactaaagagcttctgcacagctaaagaaactaccatcaaagtgaacaggcaacccacagaatgggagaaaatttttgcaatctacccatctgacaaagggctaatatccagaatctacaaagaacttaaacagatttacaagaaaaaatcaaccccatcaaaaagtgggtgaaggatatgaacagacgcttctcaaaagaagacatttatgcagccagtagacacatgaaaaaatgttcatcatcactggccatcagagaaatgcaaatcaaaaccaaaatgagataccatctcacaccagttagaatggcaatccttatagatactttaaatattatttttcttgagtatttatatttaatgcaactggaaaagaaataaacttagaaatttaaatgactgtggaatgtttttaaccattcacaagctgtataataatccataataatccaaaacaaatatcaagtcactttagttttagagaaatgttattctttataggtttgtggtttatttagtcaactgtgatgtgcttcataatactgatataaatatatgtttaaaaagatagttaaaaataatctcatgtatatgttttaagaaatgagataatcctgagagtcttaaagtatctttcccatttaagaaaaaagtagaagcaagtattaaaaggatgcagtagtgttgaaagacagtttatgaaaaatcaatagcctatgctcagacatgaaagcttattaattctctagtggagtctggaacaacttcctgtgatcagacacattagtctccctgaagcaaaagcaagagggattattaaatactataaactgcctcatcatagttcagaatttgaataaacttttggttttcagagcttttattcctgatgttggacaaatcatgatggatctgtagtaattcatttgcattcttacgataagttattattatacccattttaaaggcatagaaaccgaaagaaaaaggagttgggtaacttcttttgggtcacacagttattaaaaggactcaggcagtctgactttacaaatcgtgttcttaaacatgatgctatactgccagtgtgacagacatgcatgtatatatacatacagacacatgtataaataagcatttagaactatttagaagtggatcccaaaacttctatacatttatataattgctttaaataaaggttattttcttaaataacgattgtatattcctctcatctttttgttgccagtatgatatggtttggctctgtgtcctcactgaaatctcattgtgaattgtaatcccctcatgtaggaggaagggcctggtgggagttgattgaatcatgggggtggacttccccattgctgttcttgtgatagtaagttcttacaagatctggttgcttgtaagcacatggcacttccaccttcactgtctctctctctctcttgctccaccatggttaaatgtgcttacttccccttcaccttctgccatgattataagtttcctgaggcctccaagccatgcttcctgttaagcctatgcaactgtgagtccattaaacctctttccttgattaaattactgagtctcaggtagttctttatagcaatgtgagaatggacaaatacctagtatgtattatgctttttattctccagattattatcaaagcttgtatttaggtggatatttaagaaattccatattttttgtttttatttcaggtctaatttataaaatattagcttatattgggaatttcaactttatgacatatagtttaaagaatacatagatgaccaaacacaaacactcatggtaaatcatgagaaaaaaatgtagtcaaaactataaaatttaagttgtaagaaacttgcaataattgctacatcagcacagaacttacgtttcttaaacttggtgtttgtaccctggaatggataggtggacagcagaattatgtttactggtgttcaccacataagttaggaatgcttcccaatatttttattactgatcttgcactttttaatttatccaaacttttgtgactctttggagcaatgactgataccacatttgaaccaggtatatactagagcttgaaacatctcataacactagaaaataaggaaggtatcaaagcttactaaagttctgtcacaagaattgaggagccagcttgaaatcactaccactagccagtctgaggtaaaataaaaagattgaaacaaaggaagtaactgtaatggactgaatcacataaaatatattttaaaattcttaatattaggttggtgcaaaagtaattgcaggttttgccattaatttcaatggcaaaacctgcagttacttttacaccaatctatagattataaaattgatatcgctgataatctttggatgatagtaggaaaccaacatattctgaaacctatagggaaagaaatatttaacacgcctttcctaaattaaccgtaactcaagataactaaatagctgaagagtgaagcctccctgtatttattccaactaatgaataaagacaaaatggtagaattataatatttccactgtgcaaaacttaataaaatggatttaggtgatgattttaatggctgttaatattccaaaaaatggagcactgaatattctgagcctcctaatagaagtatacgacacctacgaaatatttttgccaaaaatattcaagtctgaatcttatcaaacttctagtataactaccagtttacaggatattctgggcactgagagatgtgtgaataatactaagcaaagaaatctagaatgtaggactttctattatataatgtataaatattgctaggatgtactaatactctagtactaatattcaggtttctttaatcacccaagtgctgtgtgagaatgggagaggagagaaaggacttacagattaaagagacttaaaaggcttatcaaccaaaacacaatgtgtggacattattcagatccaaatttgaacaaatcaactaatatagttaatgaatctaggtacatgtgggtttgttacattcttctatctacttttctgtatgtttaatattttccaaagtaaacataaaaatggaatataggtttgtacctctacctgtattttcatctttcatcactatgtaagtaacaaattatgagaatttataaaagctggaaattgggttatcattttcattatttttgaaattatctgtaattgcattttatttcctctttgatgaagtaattccttaggcgagccattaaaaaaaatctcccattggttttgactgttgtattacatgtgatcaaaaatgaggtagtgtaatttgtgcgtttttgaaaatttttagtcctcactatccaggttaatgttgatttttttgttgttgtttacaaagatatatagactattaaagaagaaatttttatctaaaatatggtagtttaccatcattaaaccttctttgtcattatattgctaaagtcagcgagatcattttaggtcgcagtgatttttttacagatactaatggctgacaccaataaaactgaattttgctcaatttttttcctaatttttttgctattgccattctgatgctatatgcttcagtagagattcatatttgttatgccttcattatgaattggattttctcttttgtcaatatacaaattctcaattttaattattaatatatatcaattatttattaacagataagatgtgacatgcaactgagatcactacattattcataacaattatgactcttaatgttaagtcttaggaaataaacctgtcttagctttttctatccttcttctttaatttttctgtcacaatcatggcctgctctaatcagaaatcaattcttagctaaagaatacatgcttctgaattcctaagcttccatcattattattgacagtatttgtggagttttacttttttcttgggaccatggagagtgaagcacattttgataaatggaggtctgaactatacctttatactggatagtataaaagcctttttagctattttaatatttcaggggaaaagaccattttgtcttgggaaaattgaatgaacgaattttccataaaatgaaatgattaacaaaatcttgctgaatttcatgtttttatttagcaggtattgtatctaaaacgttgtcattgtctgtcagaacagtgttataatgcctttatcttaaattctttataaactagctgattcttgaaggggagggcagtatatttgcttacattcattgttaatttgaaagatggatttcaaactgtagagctgccgtgaaaaatataatgctaattgtagtttgaaaagcccagacaccttctgatagtacagttttacacccaagtaatttaaatcaaaatctggaaaacacttttttttcttttgatagcatatatgtaatatgccttaattaataggaaaatccacatgctggagaatggtgaacatgattaaatagattaaattacttttcttatactatgcattaatagctttctcaaccatgtcccagcggctgcagcacattgtgctataccttactgaggaaatcgcctgatttttttttttaatcagtcttcactatcttgccattttttaccattatcattctaacttagtgaaatcctggttttctcaagtgtctagtctttctttgattttgatttcacatatcatacacatcagttatttatattttatcttgttaatcaactaatttcttcacatattttatttttcttcccaaacacatttttgttcaacttgaaggcaaaaagtatccttggttctggatcattttcctcatggttctcagttgtagagaggtggaagacacatgacaaattctagtttaactggattctgtaatttaaaaaaagaggtgttacagagtcagtcctgcagatgtttgagttccagacccttccaggcaggtcaccaggtactgcctctagacttagatgatgtcccctgataattctgtcactcttcttccgcaagttgctccccctttgtgagtcacatcatataaatgatattattttaatactttctctgtcacgatctgtccactctaagcagaccttatttatttttaatcacccttttgccacgtgggtctgctttttctcattccttttcactttatcaccgtcttaggggacttaactagccaaatggataacccatttccttgtttttctgtttccatgagcacccacacactgctcagaccctttgatttctagcattaaacttatcaattcaacctcttcctcctcactacattgattttttttttttcctacccagcctcattgcaaaacccaattcctcagtctctctaagtttttctcctttccctaccctgtcaggatctgttcttggactatttcaccagtgtactcactccagctagggtgcctctcccctgatatccctcgttttgtcagacttcattgaataaatcccacaatcaatgtgacctgaagtcctgtcactgtgctcattggttctagtagacatctagtttaccatcagtactttggattcatctctttccacttcttatttctgagagcagctggtggctctgacgacgtcccattctttaaaacatctaaccattctcttaactctcagctacaaatcttccctttgattttagtgagaaaaatcaacggcatttaatgttaactccacgattactgtttctttcctcaacaaaacattttttagaatgtcctcccttctaccttcttcctgaccttgtggcacttacatcctatgccttttcagagataatagccccttcctaggtctccttaatctttggtgctctggtctctgcagggaccttttccatcaaacaattcatcttgaaatttttatcttcattaaagcagccacaaatattcatattcttaaatctcatcaagaaaaaaaaaccctttaatttgaccccagtttccctgattatactctattttattttttcttcattagtgaaagtttcaaagaattgcctttttatcattcttgcctctatagtatttactcattaatcatctgttattctgtttccttgatcactccattcaaacttcttttttagaagtttgtaataaccttctagtagttaaatctaattttcctaagataccacgttctctacagtggaagcctttgtgtaacgtaaaagaagcatagatttatagaatctttatttgaatgttacttatatttatgctaccttctgacaaataggtgtgtatatgtgtgtgtgcacacttttttttttaaataactatctgatctgcagttttcatctatgaagaatttatggtctttcctactacttcttacagttgtatgtttaactatgtatgggatctcttaccatttttagtgcctcatatttagtaataatctactaaagagatgtttaaagctatatagataaagattaaggactgtctttaagaatgccttaatttttctccccctttctctcctacccttgacttaattttttgtggcaatatacattcataaagtaaaatctgatagagcaatcatatgggattttaaaaatatagttccaagtacattactaatggacaaaaggaaagctgaaatccataaaatggggtaaaaaaaactcctcctcccttttttgaatttttaaattttttatttatcttgaaattctggtttaatttgcaacagatctagaaattcaagtcaatttaacaaacatttgttgaattcagtaaggcttcacagcctgaaatatcaatcaaaattacttttttttaccttatattcctttaatattttgttttagtcctacaatccccttgtaacatgatatgctatatttgagttattgtcagtaataataactgacattttaaaccataattgtctttgccaaatactatgcatgctaatcaccttacatactttgactaatcttttataaaaacatgaaacccaaaaaagaacattttcatcctcctataatgatgagtaacacagaatgtgtaaataaatttccccaggtctgtagatagagccaggatttgacattaaatctgtctttttcatagcgttgcccttcccttcttcagtagttttatacttagacacttgggacacctcaaggaaaatgcgatatccaggaggaaagggataaacagatgtttatataatattataacagggcacattttcaaagcatgaatagcagtcagctgtttgaaagtgtcaaggaagcagagaagtcttgacagaaggcgtaacatttggaatgcctctaaaaagatgagcagggaaggccggggagggaaatgatggcatattcccgagtgagggaacagtgagttcaaagtgtgggcccttcagggtctgctgaggctagaatgtaggacatataccaatttattaggttttacttgtttgtttcataaacaatggtagagttatatacctcctctcttgaatccagttttgttggaactgttcatttatttagcctattgaccactatgtatttgtgtgagtcaaaaggaataaaatcagaaatgattttatgtgatattaaaagctttaaaaagcaatactaagcccagtgcagtaattatagatctgtgaccccacccccactcttacccctggagttttgagtctggtttactgctatattgattgtagctaaaatcacaaccagatccgctaaacttcttggcattccttttaacccaaattgatactaatgaatgtcttaagactacattgtgcctccagctcatgagcaaacattatgtctgtttcatcatccagtagaatgataagattcatttagggttattgaggaagattctgtaattgtaatgaaatcctggcatgttgtaactctcagaacactgttccccatagtgaacatctacaattagttggaagtaatctcagttctaaaggccttcagcagtgactacctcttctcttacctatcatttgcatgcacataaatccaatgctgatttagtttggcaggaacaaggaggaagagaggagtgatgagagcaatatgaatgggcttccatatatcaaaatagaaagttatattacaaacattatatacagcttccatttattgagaccttaccaagtgctaggttctttaccaagtactctgcatgcagaccttatctattttaattctcacaactaccctgtgatgtatgtattattaagcccattgaaaataaatcaagaaataaccttagcaagattaggtgtcacacagtgactactagattagaactggactatatgcctatctaattccaaagctgtctaatgcatgttagcaacattacattgtgactgcaatataacaactattcaaaagttaaaatatttttaagtcagacaaatctaaaacaccattttagtacatttcaggtttaatatatttattctgttttagaattatcaatattattattatttcattaaccatgatatgccatattttctttattattattattattatactttaagttctagggtacatgtgcacaatgtgcaggtttgttacatatgtatacatgtgccatgttggtgtgctgtacctgttaactggtcatttacattagggctatccctcccccctccccccaccccacgacaggcccccgtgtgtgatgttccccaccctgtgtccaagtatttccgtaaagattttcttattcaatggcagtctacaccattatatcaagcagactgatttggttcatggttctctttgattaaaatgtatcagtcatttatgtaagatatcgtcaatgaattccccttgaaatcatggaaacaggtaattaaattctgtcattttcccaaactttggctttgttcttttcctggaaaggcataatatgatcctagaataaaccaagtctcattcccccaaggctaattaacatgcaaataaattttctatacactagtgtttttactaagtaaatcattgtagctggacatatcatttttaagcagaaattttttttatttttgtattttgataactctaaaatgttttaaaagtttgcaaaggtaagaaatgaaaggctaatgtattctttttgtgcaatcagccagtccttggtttctgctcggattggtatattgaagaaatgctaatagtatatctgtaacctgttaaggaatatcaagtctcttcaggaaaggaataataaaatgctaatgatcagcattaactgtctgaattggaagggattatagaggaacatttctgtccttttcctgtcaaaagaggatcaccttctacaataatcccaacccagccattacttataccttccaaattcatgctgtagtagacattctttgagggaagaagtatatattattattattactatctggaatttcataatgctttgcatagcattttacataatatatgctaagtacatttttcaatgaatattttaaaattccaataatcaggaattctctacctcacaaagcaaccctttttatttttaggcagcatctacctacttaagtaaaatgtattctcctcatccttctggtaccaaatagcaaaactctgattcttctaccatgatggccagcacatactcatcattcaaataagttcatcagtgcccctcttaatatatgacatagacaagtgaacttcacatgctgtggttcaaccaaatatgggctgtgattgtttttcacctccctttttctggtcactaagattatattcttggcagccttatcttagctcaagtttagcagtcaactcaaattcttctgtggtttttttttctccatcacattactatcatacaaatttaccttttaaccttctccacaataagaaagaatctgtacattttaagattactgaaacaggggagaaaatagagcaggcagaaaagcctttgctttattggttggagagaaggaaaggagacacttgtaaacttatattaatcatttttggtccatcagatactttattttgcagagcacttcctcacttctcagtttttattgttttgttttatcctgtgttgttttcgtatgatctattgttgagccagggtatcctcatatgtacttgtgtgatagagttttaaaaacatttgcagcaatctgtggccaaccctcacatcaatgacatgctgctgataggaagaagtctctgtatgagtattgaaaacactgagatttacttattggatgcattttatttatatggtttgattcttatttttaatgattttttttctattttacaattttaagggtaaaaaatgtataaatatttggaaatagctacatccatggaagagagacactgatgaatgagtttgaatatgaaaatctgatggtctatcctgaaagaagaattaaagttttgctatttagtaccaaaggatgattaatagtttttctgaaaccataaaatgctcctggtatcttctaattccaagttaaaaaaactctgtaaaatgttattgtagctatttagctttaagcagattattattttaccagaatatttaaacatttctaaatattgtcatctttattcataaatgtttccaatatctgttcatataatctctgtataaatttcacatactatacagcatgcatttatatatggtaactaataatatttactacttagaacacagttagaaatgaatgcaatattcattttgtacaaagacaatatctcagaagataacaggagagcaaactgaggtagaagaatgagctaattagattggaataagagaaatgttcccactttagttctccagtgtctgttttacagactattcatttatattaaaacatgtttctaagtgaagcaattatatgatacttacagattttgcaaacaagatgtgaaattgttgagtattatacactgctccacagaatgattttaaagtattaattttgtaccttgacatggtgtcttatgtgatatttgcagattagaatgcaaataataaagttttgccaaattggtatgtatatatatataaacagttttaaaacagtatcgtaggctgggcacggtggctcatgcctgtaatcccagcactttgggaggttgaggtgggcggatcacgaggtcaggaaatcaaacatggtgaaaccccatgtctactaaaactacaaaaattagctgggcgtggtggtgtgtgcctgaaatcccagctactcggaaggctgaggcaggagaatcgcttgaacccaggaggcagaggttgcagtgaaccaagatcatgccacagcactccagcctggtgacagagcgagactccatcacaaaacacacacacacacacacacacacacacacacacataaacacacacacacataaacacacacacaaacagtatggtaaaatacaataccaacaagcaacaaattaggtaaagaagtacattggagttttgaattttaaaatcaggtttattgaaatatataaagtaaaattgatcatgttagtataaatgagttttcataaatacagaacatttttattaccccaaaaaatattccttcatgcccctttgtagtcaaatatcaatgtcactagcctttttctctcccatcctgcagtgccactgccagaaagggattgaaccactaaccctggatctgctggaaggccctgatttggcttatctagggaaagggctgcttctagacccttcaaccccacttagctgtctagggtactacacctgacccagatgtaagtgagattgcatttgtacagagaaagatggagctgccatcaaaccaaatggaggaagaagcattttccagaatatagctgctgttccctaagcagagacttggagtcctgggaacatgaagtaatgggtgcccacattatagtaatttgataaaaatcagttaataactttcagtgagatagttaaaaatcattttttaagatagaaatgacttcttaatatgctaactgtaagatacgtatgttgtaagataatagaatacacattatacctaatgtaatagaaaatattcaaggcataaatataatctgaaaaagcttatggttaatttttttagtaagtaatcttttttgatcatttttaactcctcaaaacaatacacttggcactgttgtttttaaatctcaagaataaggactcaattatttcttcaatttgttttcttcatattctgaatttcacctatatatatttattttttcatgggggagtacacaataattcagttttgaaataaattaaaataaactcagatccctttgtaaatgaaggagcattaatgtctttattaaaccacattattgaagcaagattgacatgtaaaagctgtacattttaatatacacaactttatgagtttggacataagaatatactcatgtacccatcaccacaatctataccataaatctctccatcagctccacaagttttctctcaccatctacattattattattattattacgtgtgtgtctgtgtgtgtgtgcgtgtgataggaacacaagaactaccctcttaacaaatttttaaggaacagtagtattacaaattcacctctagctttcttgaaaggcagtgccttttaattgtttatgccttcatttcattaggagtttcttctgtctaaaagcttattctgattgattttcccctaagcagcctaaaacaattgaaaaatcttgttattgtgtagctgttggaaagtcaactttgttttaaacaccacatctgacagttaaaatttactgtcaccacagtattgcccttcctgagagagatttgttgttgatttcctccctaattttgggtcacatggtagagaagcattgaacatatgttattgtgacaaaatccacacatggatatttatgaaactatagaaaccttttgcagttctccagaaacctgtgatgataacattctagttatctttggttatatttttggtgcaatatatgcatttattcagtactattaaatacctactttgtggcaagtataatttaaatactgagaactcagtagtaaacaaagtccttgtcttcacagaattgtatattggagaacaagcactacacaataattatataagaatgccatgtgaattttaagtgctattgaaaaaaacagtgctaggtgagggaatggaaaatgatggcaagatcttgttttgagaaagaagataaagtggtcagaaacatcagtcctctctgaggtgattactgaagtgaaaaagataagaaagaagccatgtgactctctgggggaggaatgttccagcagagtaaacaacatgcattagacctgccatgggcaatatttgatgcagtagggcaaggcaactcgaagtgtgctcaccatgttgatcatttattacaaatatacaacaagatttaaagcaatgtaatgtaatatttgaatacattgaactggcaattgatatgagttgcatgtcttttttatttcattatttggtaagttatttttattgtattttacaaaagtttaggctcacactcaattcagggaaggggcttgtccttcactatagataatctgagaagcatcatgtttgaggaagggaagagggccacctgggtgagttaggaaagagaagaccttggttcacttagctgtggtgggacaatgaggatattctcttctgaatgcaaaaagaatcaagctgggctgctaaaagtgagaatgggatgaaaagtaattaagagaggagatataaaatagagtaaatagttcaaggaagtagagtttcctgactgtggggagcacacacctcaggtttgtagtcaaaaattgaatgtgaactagtcattatagttatacgtttgtcattgttgttaaatccagccactttcagctgttttattacaagtgcagagtaggcagaggataaaatttaactcagatttgggtttctccagcaaaatattaagaggggaaaaaatagctgagagtttataaaaggatgagattagaatgattcacttggaatctaagctggataaagagtgaagtgaggacaggggatggccaatgaaaggccagcagactagaagtgccaatgaggccagtgaatccctgaatgggagcactagagcccatgagctgaaaggtaagggcaataactctgtgaaagggatgcccaaattggtgtttggaaatggtgcaattattggtaatgactggggtggaaaagaagtcatctcattgtggtaatattctaaaacactaatagaaagcctcattttcagacttaatgcaggtcacagtagtattattatagtaccatgttttagatgaaattagttaccaccagaaataaaacattcatgtattatgatatttagcatttcaaatcggataattacaaaggttttcaagtgtttttcttaagtgaatgtatagttcccttccttttctatatatggtgagaggtgaacttctttggagaggaatatgtgggatgagtcaaagtactgggagaatggaaagggtggggagttgctgagttattatattagtgtctgctatcttgtagttcaatgtcaatcttttgctgttgcctttagcctctcttctgcctggaaggtgaaaagaaggcatttatggagagatctacattatagaagagaaaggggagaagtgttataagtttcaggaccaatcaattttagacaaactgttgaatatttcaattcctttaacatggatgaattttgaagagtatttgagaaataagtcaatattttagatcaaaggccataaatatcttagttatattacaataatttgtaattatgtgaagaaacaatgtaccaaattgtctctacttggttttggtttaaaatatagcatgccctatatatgatagtaccaaagctttcttttgtgtgtagaaatgcattttatatgcatgacaccaggatacttagatgataaggcattgcatgaatagaaggacagtcactccttattaaaattaatctttatttttgttgaaatgtaagacttactggtatttttttctttacacattctaattttcttgagtccacttctttatttaaaaaacttcacatttttgctttaaatttttatctgtaagaaatatgtttgcatttggaggagacatgtctgtgaaaaccacacgtgtgtgtgtgtatatatatattatgtatatattttatatatacccatatattttacacacacacacacacatgggagaatttgttttcttaacttccaatggaatgctatacggtgcttccaatgtttgacttgtctagctgaaagctatgatggatttcttcatcctagatgatatgtattccctttacttcattacacttaatctatctgtgcaagatcttatggcctgtggtagactttatactctaccagacagcttatcagtttctttgcaggcctctcaatttgaattttaagtaaaaatgaataaatttgtgttgcttgttgagactttgttctgaaaggcttctgctctctgattctagggtgataactagagaaaggaaggtcatagattgtcatttacaatagctgtattgtatctatgtggtctatgtatatatacacatacatatgcatatacttgacatatgcatatatgtatgtatatgcacatagtgaatatataactaaatgcacatatacattaatgtataatatgtgtttaaggagtaagagaggagagctggttgttgattatcagaaataatttgatatttggaaggaagaaagatttatcttaatttagatggggcaatatattgtaccatctgctgtttaaaaacgaacagtcttataaaattgaaagcaaaaccagaaaataatttaaatattcttctggcttctatatgatgtgaggattgaacacattgctaaattcatcccagtgggtcaaaaagggcagtttgagaaacccaagcccaagaggaaatggaacaattttataaacaaagtaaataaatataaaatgctcttgctatcaaaattgagttaatacatctctagctgctcaaaacagttgctttaacacataatgaagctgtttaaaagatagtcaaaatgctatacctcaggtttgcactcagatcattttttttttatattgcttttgctgttggaggactccatactccaaatctcaacaggattttaggtgaggagttttgttttgtttatgcttttgtttttctttccaagttatatgtgaatgactaaagtattctaaaatctcctcacatatttatgtcttttagaagagcttatttcacaatgttctttgtaacttttatgaaggtaaagatataatgattcgttccgtgttaatctataatatatattttttctagtgtttgttaaaatatattattatttgtcaataatttgtactgaaattttatgtttcttggtcaagactgttcccctgacctttaaggaaatttgtattactatagcagaatacatttttagttatacattttcaaggtttcatttacagtacaataattttgaacactatttaataaaatatcaagcaaaataaaataatccagatcttcctttgtactttagttccatcaagaatcaactcttcctgtgcataaatttttctcaccaatgaagaaatcaagttgtgtttaataggtagtcaaaattcattatgtgtaaaggtgcaagttattaggtttactagaagaaaagagggatacagagatagtcttgaagccatagaaataattctcccttatacatggtactgaacaaagtcttctacttttgtgtaaaagcaaaatactgtagtcctccttcatctttggataatgaatcctccacatttaagggatattagatcattcctaccaataaaaaactatttatttaaaatgaaaactaagcctttgtgtgaatttaaaagtattgtctagtgtgaaaactgaggaaaaattaagtctgaaaagtcaactgcttatatctaccttctttattttgatctggccttttcttctgaaaatgtttatctgtaaaatggacatcctgatgacgacaatgatgatgataattctgagcataaatccagtagttcaaataattcactctttcttgaaaaaaaatttttctataaatttttgggaaattacctacgtacagatcagtagtcaatgtattcaaatcaattttgttgcaagaatcagggaactaaagacactataacaattcaagctagggatggacctggtaaagtagaggtgttgtagacaagctcctgacatttattatgagatatttgactactaaaaagcattccttgaggtatttatttgaaaggtaatgcttcagattaaaggaaaaaattaatgtttatatatttttttaattttcaaaggccacttgtacaaattctcttttacccttataggattttaaatacattctccttaatttgttgatctgactgtaagtaatgccttatgcttagggttattcttcagagtaatgtaaaataacatgttcagctgtcataaatgttattcatgtaggttgccaggtatagaatgaattctaaataatgtgagtgctaaggagtctggaagcaatgttgcaacttgtgtatctggatgcaagataggggtgcaatagcattttatacaggagatgggaaaacatctttctccattgcagaggaggagatggaatgacagtgtctgagtagtccaagagtgttcccagcatttgttggcaccctgctttctggtgtctcaattttctttttaattaatcaacaccagtgatttggattaaaaaaaaaatgttgctagtgaaataaaagcaaaaccttggcactgttaagtatagaattgaaaccaagttattagtatctgacagcatttagattgggagaagtagaacagagtctattctcatggactcttcagtactgcgtgatttactcagagctcctggatgttgattctgaagtccagatgactcatcagaaactggcaatgaagggcaacctggatttagatatgtttgtacattcagattagtgttagaaagagagaggcagagattgatggagagaaaaggggaaaggagaaaagagatttattgacttcattgactgtaattaaaaggaactctgatcattcaaaagaccttcctcaaagtttcacacttctttgttcatgttaaaacctgtttttgtatctaggttctcagtagggtacctttaagcaaaaagaagagaggagccctttaaactatagtttcatgaaatttcactcattttatattagtgactttgtgtgtgtgacattttattcttaaaatgtctgagatagcttttacctatcgggctctcatcacttcacagatggactattgcagctacttttttaatactgtttttaacattcttgattcctgtactcagaacctgcagaggtttaccactgcttgcaggaagttcaaattcttcatccaatgttctccataatgttgttcgttctccataatgttgttgttctctgtccatctaattttgcctcccactgttttctgaccagatcataaactcctgctagacatattctctttcattcctcgctgtcctctgacttcatgctatttttctctaggctgctttagctcacattattctcccctactctgaactttcactgatagattccactgtgtgtattccttaattgcctatacaccatacttcattttattcacccctcttgggggtgcatagaccttgtcattttcctttgtatgtcccatgtgacttgtttgatgatgagtagtgctgtctgcagagagagcactcaagtgattatagaacatgtccattaagtttcccaaatagaagactctttatctcctattctgccactctgaaaactaaacagaggctgtgaaaggctcagtattgctgatgctgtaaagacaggacacctagttgcttgaagtcccagatgattgatagaaatagtttttgtataaaaaagtgaaattgattagcaaattaaataggaataaagacaagtgagggtgatttaacttaattgaagaagagattagaaaaatcagagctgtttttaaaaaataagaataaaaaaatcagtgtggtgaacacaccaaggagactttcagaggaaggtttagataagtccataggacaataatctttaaggtatagcagaaacattggaccttcttgaataaggaatgaaattgtcacatacataaatcagagttcaagaggattaccccatccttgttgatcagtgctcagtaagccaggttgcacatctattttttcccgttgtgagacaggaaataattaaaaagggaaataatcagatttgtaacttaataatatggtttgtaaaactattttatattcatctggggctggccagaaagccatctctactaggcatgatgaaattattctgaccattctccagtatttatagtgaaaatacatgttcagtatctcttttgtttcataatatctaaacaagaacacgtggattatttccatctttaatttcgggaccaggtatatattagctcttttaaggaagtgtcatgtggcacaggtccaaatacacatccttccttgataataataagtctttatttttataaagctgtatattttgtaagtcaaatatctgtgtctttctaaatatgtgccggatgtttacatttcaaatgggcaagaaaaatacctgatgtgggatataccagttttgtggggtgagcttcatttatttatttatttgtattattacttgccattatttgaaataattcataagagctatataagctcttcctttactgcctggaatgtttcatatgacctactaaattttgcattactgtattattttagctagtgggaacatttagtataattactttggctattctttattagattatgagcctcccattacttctaaaagactatcttggatgctgtttgggttcagtaaataactatgtattactgcaaaggtatactgagatttctattttaagtggtgtctggctagcagccctggacacaaccttccaaaaatttccagtaaattgactatgaagacacacaaagagatatctgttcgtagtatggataatatagactgattgtcgcttactgccagaatttgagaggaattctggaattgttttcctacatttagttacataaaatttcaaaactatagcagttaagataattttctaatggacacttgcgtacccacctcctgtatgttactattaccattttatcctacatgcttatcccccactccattgatggaactagattttcaagtgcaattggtggcttacctatgtacacttttggaaatagagctaagtttgccctaaggcaataagtaaaaagctgcatggctcaaaataaaaggtttctttaaactgggaactggaagctactcatatattgtataaattttgcttttcaaacaaagcaaaccccttctgcaagtacctatctgttttagtatgtattcagaaagtaattaaatgagaaatagggaggaggggacatggttatattttgtcccctgcagagtatagctctcacaagtggaaccctacaagcaaaacagataggaagaggctagggtagtggtttatgcagcagtgtctagttttgtacacattccagcagttctgaacttagtgcactgggctattggagaacaataaggtccacttcagaactgtggaagatccctagaggatagattctggggtttggatagaaaccatgtacgtggactagccatccagctctgagcaatggattcggccattacagaagggcatatgaagtgggccaaagagtgaagaatgcattttctttgttggctatcacccaagttaagtatagctccacccttgtccacaaatacaaaaacagaaagaaataagatagtggttttaaaacaataaaaatacttcagaattatgctacaacagtaaaatcctaatgaaaatacaactgcatctacagtgttttgcagacaggtacctagccaagaattttataccagattaagtaagtcttcacatgagaaggcaacaaaaaggcattttttaaaaagctaaagttgaagaaatatacccttatacaacttcataaaaaaatatttgaatcaaaagtaagagcctaaggatgccattttattaaatgaattatgcatcttcccttacacattccgatcctagatcacgaaaatttagatgggatgtgtgtttgatcagtaaatagcgcagctcagggaagcaccttaatccctatatgtaatgcttttctcagatgttttatttcttcattttttgataccatatgtatttgtctgcctaggatgccataacaaattagtacaaactgggtggcttaaacaccatggttctggaggctgcaagtctgaaatcaaagtgtcaggaggtttggttcctcttaggcctctctccttggcttgcagatggccactttatcactgtgtcctcacagtgttctttcctaagtgtgttcacatcccagatatctctttctcttcttatgggacaccagagatactggaataggaccccaccctaaaaacctcatttaactttaatatctccaaatgaagtcacattcagaggtattaggagttaggttacggcttcaacgtacgaattttggggagacacagttcagctcataacatcttattcattggtatatctgacgacttcttaaaactctaccagatgctattcttttcttgtttttttttattatttttatttttatttttttttattttttgagtacttgatcacaatggccaacctctaaatgtaaacgtgattgtggcattcagggtaaacccagtgcacatctcatagacttagcttcactgttataaatcaacagcatatggaattagcagcattttgaggctcagagggcatagggatatcctagtgcaggatttagctaagaaggccttgtttctaaaacagagtgaatggagcaaagtgcatgagaatgcagtggagcaggctggccatacacctttcaggctcactccctaggctgaatctcaaccacattgaaaaacagttctgggaatccccaagtttcatatacatgtgataacaaggcaaaagtgaacagacatttctgttgtacaggcagcataaagttgcttagacacaacaactccttatatctaagggagccaaagtgaaaggtggaccatggcacagtggctttaccaaaccaccagggaagagcaccactgctcttgggtccagccctctccttcaaccagtcctccagctggtcaagaaacatagttcaacagtagttcaaggaatagtgagagtggaaaaaaggaaaccccacatattttttgtgagcacacatcaatcatggttagaccttgccttatctaagactaaatagagaagaaaacaaaatgtggtgatatattagggtcctccagagaaatagaactaaattattaggagagtgtgtgtgtgtgtgtgtgtgtgtgtgtgtgtgtgtgattgaatgattaattttaaattggttcacaagattgtgaaagctgataagtctgaaatctgcagggcgtgccggaaattcttgcaatagtggatgttgcaatcttgagtctgaaggcagtctagagtcagatttcttcctctactagggacctttgtctttttctcttaaggccttcaacttattggatgaggttcacccacgttatggagggaaatctgttaactcaaagtctactgattaagtgattgatttgtttatttgttggttggttttaagatagggtcttactctgtcacccaggctggagtgcagtggtacaatcactgcagcctcgacctcttgggctcaagcactccacccacttcagcctctcgaatagctgggactataggtgtgcaccaccatgcctggctaatgttggtattttttgtagagatgggattttgtcacatcgcccaggctggtcttgaacccctgagctcaagtggtcagcctgcctcggcctccctaagtgctgggattacagacatggtgagccactgtgcctggctctgcttaagtgttaatcacatctgcaaaatgccttcactgcacacccagtctaatatttgaccaaaccctgggcaccatagcctagccaagctgacgcataaaactatcacaggtgactataaaatgttctgaaatttaagttttgaaaaatacagttatcacaaggcagagtagaacaagatgtttaacaaatctctctagaaaagatcatttttatatcatcagtagaattcaaaaaatacgggctctgagacaagagataagacagaccaaggagcagttcaaactcaggaataatttttaaatatgcgcatgtcctaagaaaagctataaatacataagtatgtttgttttgtattatatagttgcatttgactatggaaatggaaatatatccttcctcacaaatatagtttattgctaattattggtaaatatatttatttgatattgcaataatagtattattagacccacttagggccaataaaagctcataggttgtcaaaactgttttgtcactttggttgcaaggggcagaatttgattcttaaaatattggaattttatattcttattataaatttgggggaaataaaagataaggagttgccataaatatgtgagggcccacaacatcagtgtatttcttgttgtttaaaatctttctttaggctaggtgtagtggctgatgcctgtaatcctagcacgttggaaggcaagacgagaagatcacttgagcccaagagttcgagaacagcctgagcaacatagcgagaccctgtctcaggggaaaaaaaaaaaaaagcctttctttagttattatttcattcagatagctatgaaagtatttttggtttttgcttgcttgtagcttttctgttttctaccacacaaaaaatccaattttaattttgggtttgtgaaatatgttttatcaaaatataagcctgatgtttcttatcttccaaaaaatttaaaaatattagctcagatgtaattttgatcataaatgattaacatgtaaacttaaattgaatgtaaccacttcatatggatatttcaaggtaaaaaatgaaatctaaaatatctgcacactacttttaaaattttgtccataaaaatgagaaataccgattccttatattctcaaatttatttcatcatttatatatgtcatatatgaaaatgtgttctttttgatatttactttagatatcaaaataatacaaattttaaacctgaaataaaccgtagatatccgttgtcaggattatatcttataagtcacatcattctattcatcttgtctaaactaatattgttatatagtatcacacaagaaaaaatcaaactataaattaaatgtcaaatttctgtttgtttttcaacatacagttttaaatagatgttattattctctttctgtataaataccctgagcagaaattgtcagcatgcacgtatcttttttatggtggaatttttgactaatgagtttttgttagaaatgtatcagttctacttcattttatagttgaggtgttcatatgagtcagtctcagtaatttttgagtgactttctgtagaaagttgttctctaactagaatggaagatgctgacacctagatgttcaaatggggctgatggaaaaaaatcaggacaattttgtatcttatatgggcaacaaagcattataaaaggacatgaaggatggtttgtcatatccattagtttttgccgttttatctattagacttgcagtagcatatgtagaacacaggttgtgtatggtgggaataattttgtggaggatattatgagtatgatattcacatgctaaatgaaagtcaagtatgccataaatttaactaatgtcacttatgttttgttcacatagtagtggtgtcatcagcgtaatacaggaaagatttacagtacagcccaacatgactgctgttctctagtgtgggccccggtggggaaagggagaatcagaggaagagactattactgatggcactagttttcatttttaaaacacacagcctgggctgggcgctgtggcttacgcctataagcccagcactttgggaggccgaggcgggcggatcacgaggtcaggagatcaaggccatcctggctaatggtgaaaccccatctctactaaaaatacaaaaaattagccgggcgaggtggcgggtgcctgtagtcccagctactcaggaggctgaggcaggagaatggcatgaacccggcaggcggagtttgcagtgagccaagatcgcgccactgcactccagcctgggtgacagtgagactccatctcaaaaaataaaaattaaaattaaaaaataaaacacacagcctgtaactatttgaccttttgtcttttatagtattttagtgtgcttttatttcattttatttcattttactgagcattttatttcatagctttaggtacaaatgtggaaattttaggagcaaagcagtttgtaattatttgtctcaaaaaattgatttgacctttaaagacatagtttttgtgcatcaatgggactaatttgtttaaatagtttataaacaaactattaaccagtatgatatttttcttaaagagatcagagccaagaacaataacaaaaaagtgatgactcatttttcaactttcaatttatgttacaagacattatcacagcattcattggctctaatttgacattaaataaacacagtgaaaaaacaatctttgaaaagttattcatgctttcgtataaacagagagatggtggtttggagataccccttttaaaactgagcctcgttaatttaaaacaagcacaatgatacaactgtacttgacttgaaggagggcatattgttctgcaggcgtcctaattttacttctggtcagagggacactggaagattttcagccagaactgcagtgagagatgaatttttattatatgctgagatgctcagatgcctggaaacagaaaagagctaattttactgttgaaaagtagttaataggctacctgtttccaaatatgcacctgccatcccccaccactaccatcccaagtagatgcagactagagcattcatagtggtcgttcatccgatgtggctccgcatagatttttattaagtcaggcatggtttgtgtagccctccccgctcctggaactgatcacccatgttttttgctaccagagaagtagtttttcaagcaacacacagcttgtatgtggaagatttccaaagtcacaattgcttctttatcttccagtgactttgaaagaaagccatggcatgaatagaatgctcaaagctctgtccctgcacaatctgtagtcctttatttcagctatgctttttactgcttcttgggaattgatttttctcttcaatgtaccacacccctttcaattctctctccttaaaatggaaaagagaaagaaaatggtgcacaaggtgtctgagaagtagagcaaaaagtagacatgtgtaaatccataaggatatgaaatggatggaaaatataagacacaagacaaacaatactcattcatgcaacaataaattatgtaattctggagtggaggagctagcccagaactttgcaacattcagaccaaatttcttagactataattcagttattcaatttttttttatatcggtacttccttattccttaatgtgtctgttttcagagccttgggtatctaaatcagaggtgaaatctctccgtttctatgccaaaaccattccattttctggtcaaatagtccctgagtgtttaatgtaattgccaaatgaattttcaaaatatgccttggagagttacaataaaacattttcaaggctcacaagtcttacggtgatcaggattagtttgtttaaccagcatttcctaaatgaaaccctttcactcgataatgactatttttatctcactaccttggattaatgtgtagatagtggactgtacagattcaaaagataaaggaaaaaaattttaggacttagtaagagaggaatatagggttaggtgagcaaggcttctagatttctagctcgtaactcagtgggaccattcactgaatgagacactggagtatttttttagggctttcatatatgcccgggcaacaaagtatgtctcgtattcttgatttgaagaaaggcaggctttctgttcattgcaagagttattattgagagcctatcctttgagaaaatataatgtttgcagaaatagatttgatattctagctatgtaaagaaatgaaactttaaaatgtgagatagaaaaattataaccagaataattagaacaaattacattccacatcaaggcaccttactgtttagacttaagcaattatttaatgtctgcagtattgtcatctgaaaacattctatgacttagagaaaatataccatatcataactctaactgtattattctatctttttgccaagcaatacaagcagagtagtacattcagaactggcaagatgattgtctgaatgtgacattatctgatgacactcagaaagcctttaaacataaaagatatagagaaatgcttcattgctttccttggatggcattttttcctttcagcctaagcaagattaatgttctcaactgacatgatgacacatctagctgtgaaatgacaataaagtatatacaaaatgggagtagggacatgcctaataaaatgcaataccttaattttttttctaaatactattagtttgagattgttctgaaggtaatgatgttcaacttgtaaatgtgttgcatatgccattatgtttatacattcgtctgtacacactgtttttattaggagtgatatatcacctcacttttgcttgactcctgtatctcagaaaagtgatggcatttcttattctcttcagttctatttagcagacatttactgagtattctgttgttgttgttgaaggtagtgtgcaatatgtttctaatatgaatgtaacaaaaagaacctgagaatatcaatgaaatttaggtgaatacttaattcctggtgatcaaagctaatgggtgttctaatgaaaaaaagtctagcactatcatggaataacagcagaatctggagcaataaggcaagaaataattttatttttcagacaagccacattattaatgaaaacatgcaccacacatgaataacattggaatattacctctttcttgaatagcagtgatgagatggcctactctgagaggtactgaaaaatcagttgaggagattattgagcttaagtgtgtaataatcagaatgaaaagaaatacatgtagtcagaattacaagccaacttaaacagataattgataaggcaaattgtataatattcaaagcaagaaagaagacctagaatacatcaagatctctatctgtacaaatcgtggttcacataagcagtatgtgcaattagtggaaatatgtcctgatgaaatcaataggcctgtttaggccttacttttcaaaatgggcactagtaacatctttgatagaaagaattcttgttgcagtacattgaagtattggttcatgtcatttctgtgcagcactcatttatcatctgtttcaaatgaatctttttggtacttcatattagcttgtgaacgtacaaaagtatccttcctatcaagtaactctagcattagaaaagaatgactgcctcttgagagttgagtgtatagcttgatttattcatctgcaacagaaaaattccttcaaaagtttttactgtatcttaaaattttgttggaattctgtattctttcttctggcatgttattgtgatttctaccttaactctttagaatccagaggaggttcaccagagttttcttgtggtttctcctttttcctgtgaatacacaagtactctcttttgagaagcacagtattgtgcagattttgctctcaatgaattggtcatgatgtgccaaaatgatgttcactcaaagtgttctgggaatcaagggaagagaattgacggctgtacctgtgtccatttgaagggcaatttggataggagtggttttggtaaaccaatgaggaaaaagaagagggtcttccaagctgaagcacagtgcctatgcttgtataagcagtgaggctgggagggtggggtgagattctaaagaagatggaaagatgactcgagatcaccttgtctgacttgctatgcaaactacagattttgatcctcatgtattacatgtattactgattctttaacattgaaagctactttaaaaaatgaaattagtgtgaaagttcaataaatactttataaagatataattatcttaaaactttataaaatttccttataagccagtaagtgaaagagtattttgataaaagcaaaaactaaacttcattggttttagatgatagcagccatcatatattggccttaacttctcattaatttctacattttgttttggtttcatggtgtctggaaaatccttattagtataaataatacacatcattttaaaagggtatattaatagtttattttgaaatcacaggacagtctcttagtaagctgatccacaggcttgaaagaggaataattggaaattattttaatgctgagtcattaagaaaatttaactgctgcttaccatgcttaccaggcaaagagtttagtttagatggagtacaccaatcattattgaaagataatattttgaagtaatctcagatatgtcaatattctgcttagtcagacattgagtttgtaaatagccatttttcctttagtttgcatgctgcgtctaaaaggcaagttctagtttcatcaaagacactctccctacaggtaacattgtgaccttgcatcaagaaagtgagcttgttcagctacataaaatcctaggtcataagcaggacaagacattgcatcgctgttgtaattgtttaggtataaagctaatacagtgcatatagggtctgtattgggaaaactataaaacactgatgaaagaaataaaaacacaataaatgaagaagagatattctgtgttcatggaatagaagattcaatattgttaagatgtcagttcttcctaacttgatcttaagattcaacaaaatctcaatctaagtcccagtgtctattttgtagataatcaataaaccaattctaaagtttatgtagaaaggcaaaagacctataatagcaaacatagtcgtactgaagaaggaaaacaaaaagttggagtactacagttaaccaatttcaggaataactgttaagctacagtagtcaagataatgtggtattggagaaatactagacatatagatcaatgaaatatatcagaaaacccagaatagacatatacaaatatagtttactgctctgtaacaaagacacaaagatgatccaatgaagaaagtagtgtcttttcaacactgcaaattagcaaaacatcatacccctctaaacctattagaatgactaatatccaccaaaaaaaaaaaatgaaagtaccagttgctaacatggatgtgacacaaacaggaattttcatttattgctagtggcaatgcaagttggtacagttactttgacatttcatacaaaattaagcatagtcttaagatactatccagcaatcacattcttacctaattgattcaaaatcttatttctgggctgagtgccatgggtcacccctataacctcagcactttgggaggccaagatgggagcgttgcttgagcccagaagtttgagaccagcttgggcaatataatgagacactgactctccagatttttttatttaattatccaagtgtggagctgcacacatatggttccagctacctgggaggctgaggtgggaagatcgcttgcacccgggcagttgaggctgcagtgagccatgatcatgccactgcactctagcctaggccacagagggagactccatatcaagaaaaacaaaaacaaaaacacttatttctgcagaaaagcctgcatacaaatatgtataagcagctttatataaaatcaccaaaaactggaagcaacccaaatgccctttggtaggcaaacgaataaagaaatggtggtatatgcacacagtggaatactattcaataataaaaaggaataaaaagaaatgagctgttgcttgtctcactcataaatgaacaatgaaaacacatggacacagggaggggaacatcacacgctggggcctgtcagagagttgggggcaagggaggggagagcattaggacaaatacctaatgcatgcggggcttaaaaacctagatgacgggttgataggtgcagccaaccaccatggtacatgtatacctatgtaacaaacctgcatgttctgcacatgtatcccagaactttaaaaaaaaaaagccttaaaatagcaaaaaaagaaattagctatcactttatacataaacatgcttgagtcttaaatatatattgctcagtgaaaggagtcagtctgaaaacgctaaatattgtatgattcaaataatataactattttttaaaaccccaaaggcgactgggcacagtggctcaggcctgtaatcccagcactttggaaggccgaactgggtggatcatgaggtcaggggttcgagaccagcctggccagcatggtgaaaccctgtctctactaaaaatacaaaaattagccaggtatggtggtgcatccctgtaatcacagctactcaggaggccgaggcagaagaattgcttgaacctgggaggcgggggttgcagtgagccaagattgagctactgcactccagcctaagggacacagcaagacttcatcgaaaaaaaaaaaaaaaaaaaaaaaaaagaaaagcccaaaggcaagtgtattagtctgttcttgcattgctataaagaaacactcaagactgggtaatttataacaaaagaaaggtttaattggctcccagttccacaggctgtactggaagtatagtggcttctgcttttggggaggcctcagaaagtttccaatcatggcagaaggcaaaagggaggcaggtgtcttacatggcaggagcaggagcaggatgggggaagatgctatacacttttaaacaaccagatctcatgagaactcactatcatgaggacagtatcacagggtatggtgctaaactattcctgagaaaccaccaccatgatccaatcccctcccaccaggtcccacctcctacattggggattaccatttaacatgagatttgggtggggacacagattcaagctatatcaccaagtctgaagaattacatgacattttttaaaaggcaaaactatagagacaatgtatgagttaggattgtacagaaaatttgaaacaatagaatgtgtctatttgtagaaagggattaattatagaaagcagctcatgaaattatgtctgctggtaaatccaaaatctgcagtttagcaggtttgagaacaggagagtcaatggtagttctagttagaaggctggcagcctggagactcaggagagctgatggtgcagtttcagttcaaagggcagcaggctcatgactcatggaggagccagtgttgcaaatgaatttttaagggcaaatgttgcagataaaatctgaaggcagtctgctggagaatttcttttttcctcccggaggctggtctttttgtctattcaggtctccagctgattggataaggcctacccacattatggagggcaaaatgattaagcatatattaaatgttaatatcatccacaaacaacttttaagttgacagaaaaaaaaaataataaccatcccagaagataaagggatcagtggttgcctgaggtttgtggaggagaagaggtttgaataggtgaggcactgagagttttttaagggccatgaaacaatgatactgtaattgtggtgtagtggattgactgatgaccccccaaaaggatgtgtccacatcctaattcctagataatgtgattacattacatggcagaaatgtgaatatcaccttatgtaatatctaatgtgttaaacagatatgtttatatgattaaggactaaggacaggtgtgattaagaattaatgaatagggcctctcatggtggctcacgcctgtaatcccagcactttgggaggccgtggtgggtgggtcacctgaggtagatcaggtgtttgagaccagcctggtcaacatggcgaaaccctgtctctactaaaaatacaaaaattagcttgttgtggtggtgcatgcctgtaatcccagctactggggaagctgacacaggagcattgcttgaacctgggaggcggaggttgcagtgagctgagatgttgccactgaacttcagcctgggtgacagactgagactctgtctcaaggaaaaaaaaaaaaaaacaagttttaatgaagggattatttggaactatctaggtgggctctaaaagactacttcagccaggtagtgaaggtcggcatccacagtgataagtcatgttgttagtatacgctcttgctgtggtatgatgtaaatggcactttacctctctggtttccctccccaaaactcatagactcagtttataatcatgaaaaaaaattcagacaaattccaatggagggacattctgcagaatacctaatgactatttcgtattaaaactgttaaggtcctataaacatgggaagtctggtaaactcacagaacttagaagatgaaggagatatgatgtaattaattttcttggttgggaacctggaacagaaagaggacattaagtaaaaactaagtaaatctaaataagtctgaataaaatgagtttagttagtaataatgtaccaatattggttcattaattttgacaaacataccatgttaatgtaaaatgctagtaagaggaaatgctatatggatatatgggaactttgtactatctttggaaatttcctgtaaatgcataactattctaaaaatttatttttacaagagcctgtgtacatgcaggcctgacctttaaaagaaaaaaaaagtacaaatttcctcctaagttgtgtattagtttcctacaactgtttatcaaagaaccacaaactgggtgaattgaaacaacctaagcttgttctatcaaagttctggagaccagaagctcaaaaatcaatgtgtctgcagtgccatgctctctctgaagtttctagggacaatgctcccttgcctttttcagcctctggtgactcctggctttccttagcatttttgggcttccagatgcatcactccaatctctgctttcatcttctcatgttcatctttcctatgtttctgttttctccttttcagattcttaaaaggatattcatcattgaatttagggcccacccaaatctaatatgatcttaagatccttaattacctctgcaaagagccttattccaaataaagttccattctgaagttccaggtgttgacatctgtttcgggacccactattccacccacttacaccatgccatatccataaagtgttcaaccatctgcatgaactgggcaaaagaagccttcagaaaaataatctacagtacaattgagtatattattagtctgccaagtgttagaattttcttaatgattataataataggtaataattattgaactcttactgtatggtattcactgataagcatgctctacatatattctcttttaattttcatactgcggttatccttcatttgtaggtgataaaaccaaagcactgagtagtgaagaaacttgcctaaagtcatacagctggtaaatttcctcccagtgttaacagcatttattgctattaaaactgctaataaaatgtgtatcaaacatttgcagaaattctgaatccttctatggaacctgaggattctactttaaggtttaaagtcatgagagagagaggtttacattgaaagagttttcagctccttggtaagaagttttatcagtctcttttgctgaggggttcttgtgatagaactcaatagtgctttttcaatttataggatttcaggtaagattccacctccgttatccagctatcttctaatatactcttatcttctctattaaatgtttctctctgaaaatgatttaccttcttattcaggcttcctcctcagtagaataaccccaaactcctccccacccctatacatgcacacatgtgctattttatccatttaacttgtgtcttcccccaaagacttaaaaattccttcttaataatgtaaaaacttataaactctgctacaagcatacgtaacatttctcgaggctattaaaaatatctagatgtcaggtaagtgtatatgatgaagtaagtgattcaaatagaacaattaacagatggcagcaacaattatatattcatattcctggccaacagcatttggtagatataattaccttacaggtgttaactgccctttatggaatgagacatctctgaacactagagaaacatggttaacgatggtcacaaatcagtaaaaattctatattgactcatttttttagacaagaatcagaaagctaaattcagtttttggagtatagtgctaagttcagaaaaagtgaaacttaaacaggagagcaggtgtggtgtaatcttcaagttgattgctgggatggggaaaaaaaaaccccgcacattaaaagacatttaaaattcactcaacatttggaaggtacagagtccaaaaaggcaatcatttagggagaaggaagcagctgttttgacttattcctttgagtttctttaaattaccttagtttcatatgcaaaatagtattaacatgcttttttcaaacaaaacttttctgtgcagataagtttgtacttatgtttctttatagcctttagattattatactagaatgaggataaaatataattttaatgttactgtttataatgtttcaatcatttgaccagaaatatttgaaaacctggatagcctcacacacacacacacaaattacatcattcaagtgttgtcattttacttttattttctcctgtgaacagtaaatatttgtcacttccatttaacatttgtatcacttgcagctatctgtccagggaaatattaaatgactatcagtccctactgggagtgatattgtctgattaaaactaaatttcctcccttctgttctacattggagtcatctctaaatctctgaatttaagctgtactcagcactataatttaaggctaatttattttacctttattttttaagttatgttttcaaagtttttgattttgtagttttacatagtaatagttttacaactattttgtaaagctcttgaagttcagcatgcctcttctcaactcttatttattgctgaataatagttattactcaataaatattttgattgattaataaaaacctatttcaaataactattttctaaaattatttttttctcttccaattctgaaggaaaaaaaggtaatatacagaagtgggttgttatggggaaacatgtttattgtgctatagtcctcttttcccctgtaatgaaaagttaggtttttagtagtagaaatgtcattttagtgaaatatgccataattttactttagcgttatattccctataacaattgaaattaagtacatgttgaaatacttccttaaaaaaatttaaactggagtttaagttttgacttctttgtctaagatattctccaacacacctgatgtttcattttcttctttttcttgtgcagttaagaatattatacttttctgcctttatcatgattaatattcaataagtaaagaaatttttccataagcaatacatacataaaatacaaccataaggaaacacttttaatcttccctggtttctggcttatgagtttggtaattccttagcatttaacctttgtcacaaattgccatgtggcagtgtgtatgctgtctttttgatagatttccagtagtgggattactatattcaaaataaagagcctcaaatagagataaacatttatgtttcatgatactctcgttttagattggaaacattcagaagtttctgaggtgagaattgttaaaagaagaaagctgtcctacatagaatacctttaagaatacaatttttacatattatttgaaacaccaaaattattagtagtaatataatatcaattctaatcatgtctataagaatagatttgcataggaaaaactagaattgacatgcaaaaaattaatattagtcgtgcttgaaagtaggattaagtttaaaattatataatgataacaaaatattatcaaattgaaaagttacagggaaattagttaacaacatttctttcagttaactttttttcagatttcattggattacaatggaatactgaagaatcagacttcttcctgaaacactgagactggaaaaaacatttaaccttatttttaatacaaagagaaggataggaactattttgtgtggttgttgtaggaaccaaagaaaatgacacataaagcacctaaataattgcctggtatatagctattgctgaatacatccaaactttccttaatttttaaaatatgtccatcggttcatttgaaaatagagaatatctagcataaatatttttgaagctattctcctaagcattgcagttactggttttccattatacttaaccttatcatgatatcctggagttaatgtgaaaggagaagtaaccatgattgagaaacctgtatacaacagaagtctttctcttttgagacaaagccaatttggtccttgagtaaatttatttttttagctattattttatcagagacaactgtagcttattcctggaaataactggcaaagtcagcagcactattagaaataaatcctttgagaaaatattttcaaacttctattatataattttgaatttttcattacacctaaagaagtttgtgaaatatgttttagcaagaatgtcaatattcaaaaccttttatattttaggagatgtttgcattcttcattggagagtaaaattgggacttaagtaacaatatctaatacaattcattttgatctttgaaatttaatgtaaagaaacaggaatcaaaggaatgtaaatttaaaaaaaaaaccaaaaaacacatccatggcttgtgttgtttgttatttgtttagttatgtttaagtttttttaacttatgtttttaggtatgtttttattactggagagaatcaagaccctgtaaatatactttactagcttagattccatttaattactagattatatgttatttagccaataggtgaaatttaaatttacgcatgtcacttagtatcttcacctggcttttcagaaacagctgatttatgctattagagcatttaaataatgtttctcactgttcttttcaagactaaatggaagctcacctgagagaaatgcagtaaatgaagtcaactggcagatgttctatgggaaagaaagtgctattgcagtttagacttccagtgttcagaacttccgaaaaagttttttacaagataaacctaaggaaagtgaatgaccaaggattaagaggaaaattttcttctcagattaaaaccatagaataaataggaagcagctgagaaatgtgtggcagatttctcaagtggaaaaaggttaatgttggggttgccctcaggatcaattttaatactggtagcatgaaatctattaatgagtcagaaggcaagctggagatattttgctgatgtcatcattttgtctcataccagtaacaagaatagattaagaacatagctaaaagaaaaaccacatttttaaaaaaattcagaggtcattataaacaccaaactcaaaacagtcctttccaaacatgtggctttcctgtgttcatggttcaaaggaaattgttaagggaaaacttctttagttttattgttaatgtaaaaagtggtgtgtaaaattcagcattcttcctgcttttctgaattctacgtcctgtatttgtcagcagaagtggccatattagagaaaaaatatgtgcatgcatagtttcttccaaaattgggattggatggctaaggcaggtgccagggtatttgtgcaacacagacacgccaccatgtaagtccacggtgacctagctttgttcccattaggtgcaaatcatgctatagatcccttcaccaaaaactctgatggatagaagagcaaatgaagttatttgagtcataggtcactatgactattatgtattggtattattgttgtttgcctatgagcatttcataatcaaagaatctttgcatgatgagtgggtttcttgtgttttccataatgaggacgacttcttgttgagtttgtgcatttattggttcttggatcatgtttatcctgtcacaaaaaaatgaattataaaatacaagcatttttaacataacatggtccaggcacagtggctgaagcctgtaaccccaacactttggccgacgtgggtggattgcctgaggtcaggagttcgagaccagtctggccaacatggtaaaaccccatctctactaaaaattcaaaacttagctgggcatggtggtgggcgcctgtaatcctagctacttgggaggctgaggcaggagaatcacttgaacccagaaggcagaggttgcagtgagctgagatcatgccactgtactccagcctgggcgacagagtaagactccatctcataaatacataaataatatgaatatttatatcctgaaaactaggttgcataaaagaaaagctgtgcaaatcttaattgataaaaatgaattaagctggagactaaaaaatacagaaaactgcagcatttaaatacagcagattataaaatgttatattaggggaacaactatttttgttgccaatggattcaaacttactaatttcagattcttctaaagtttatgtcgtgcgattgtaaatgttatactccttgcggaagcattacctaatcaatttgatttgccccattgttattgaagatatattgcttagcactccaaattacaatctctctaacactaacataggaaaatgcttttcaaactgggttttacagaacttatttcttcctagaggagctttagggggtattgaacgctgtaatccataaatctggaattgacatatccttgttcatcaacatagatttgctattcccattaattagtttattttttatttttattttttattttttatttttttgacagagtcttgttctgtctcccaggctggagtgcagtggtatgatctcggctcactgcaacctccgcctcccgggttcatgccattctcctgcctccgcctcccgagcagctgggactacaggcacccgccaccatgccctgctaattttttgtatttttagtagagacagggtttcaccatattagccaggatggtcttgatctcctgacctcgtgatccacacgcctcggcctcccaaagtgctgggattacaggcgtgagccaccatgcccagcctattagtttatatattaatgggaatattttgaaattaggtttcagtaatgacaattttgtctcttcataaatgattgctcaacacaagatcttttctctacctgcattttacagatgaatgaattgaggcttagaaagattacataccttgccaatgttcacctggttattcgtggatccagattggaatataacaaattccacaactctcctctaatccactgcaccatattgttgattgctgatataggtatagggatgtggatttcctttgcagtcttagaaagaatagattatttttacccaagctttggattcttgtctctttggttgcaccatgtcttatctgccaaatcttatctgtccctctttggttgtgacacatcttattgttgaaaaaattttgtgaagacatctgatttttccagagatatatagttatcaatatattcacatgtatctgtagcacgatgttttcataatccaagaataaatcaaatggcctgatatttcaaataagggtcagattatatctgtactacatttcaaatattaagtatagataaaactaattaattctaaattaaataaagataagaagcatagaaaattcatttctaagaggttgtaggtcctaaatctaaatttagataatactgtgtccctgttaaccttaatccatccctgaccagtaactgacattgtaaataaaaggcagattagaccatcaagtatagaagatataattaggagtatcaagtgtaacagaagtagaagaaatcttgtaaaatgtaacaaatgattgagataagctgtgattttcacatataagcaatagtctgtgagtagttttggggaggaatgttaaggagggctttagtgaggattcagggtgaagtggagagggtgtttacttgtgaatgtataccgctctgtgtgttgattttgcagataaaaaacacattttcaagttagtgactagtatgcattaaatatgggagagtaaaagaaggatgtatttaataggaaattcacttattttccatctgtatctgattatcttaaaataagacttgttcactgtaataccatgtgaacattaacattcaggttttaattataagttataaactaataataaaatgtatatcatatattactttttgaaatcccttttatatctgttattctaagtcatttaaaccttgaaagcttgtaatatagggattagcattcccattttaatgatggaaaaaagcatctataaaactttagtgtgaaatttatctcttcactcccttaattactcttatatggcttttattatataccacttgcttcctaattttatttttatgatcagctttttataataaaatcattactcttgtggctgtatacctgtctatatgtttttgacattctgtacatttttacataagtgtctgtttcagttgtaccaaggagacatgtgtgggaaagtggagaaagggtgagcacttccaattttatatgtggctatagaaggtacatttcctagaacacttgctacagaagtgggacattgcttctgaatgtcctacatgtatgagccagaggatcctaggggacatatgtgtttgacttagaaaccaagagtaaatgactgtgtccagtcaggtatgctgagctgttcaggctggctggagacctgtatgattttggggtatggtgctgggtgcagtccagtagctggaagttggccagaatgccaagtgcttgatatatgtcctgggatgattggcattaccttgaatgtgacagagagtagaggagtgacataatgggattgcattttaggaatatcaccctgggggactgtgttttggtttaattttttttttaatcgcagaataagacacatgtataaacaaaagaatggctgaagaaaaacaaagtctgtgatacttacatatatagcacaagttgacataaatgccacttatacctgcctttctttttgctcctggcatgcctttatttcagtggcccctctgggtctgctctgtctctgggtctttactctgagctgtatacctgtaatatgttttgctctgtgtccccacccaaatctcatcttgaatcataatccacataagttgaggcagggacctggtgggaggtgattagttcttgggggtcgtttcctccaggctgttcttgtgatagtgagttcttgctagagctttttttttttttttttgagactgagtcttactctgtcacccaggctggagtgcagtggcgcgaccttggctcattgcaacctccacctcctccctggttcaagcaattctcttgcctcattcttccaagtagctgggattacaagtgcatgccaacatgtttggctaattgttttgtatttttactagatacaggatttcaccatgttggctaggctggttttgaactcctgaccttaggtgatccgcccacctccgcctctgaaagtgctgagattacaggcatgagccaccacgcctggccaagctgatgcttttaaagtgtggcacttccccgctcacttgctctctctctcctgccgtcatgtaatacatgccttgcctcctcttcaccttctgccataattgtaagtttcctgaggcattcccacccatgcagcactgtgagtcagttaaaccttttttcttcataaactacctagtctaaggtagttctttacagctgtgtgaaaaagcactaatacaatctggaatacaccccacaaacctctaagtaatcaactcctgcctcttagccttcaaaatgcaactcaaatggtctttcttcaaggaagccttacttgatgccttattatcaatcaaggctttcttgttatatgttgtcatagttctttacagttttcttttataacattaatcacagttttactcaaacactgttggataccataaagatacattctgtaattaaggatagtatatatatgtgtgtgcacttatgtatacatgtgtccgtgtgtgtatactttgtatgtatttagaggactgtgacttcttccttgtgaggtgttttttaagtacacagaagcatttgtttactgggatttgaaaatgatcttgccaaggcaggagaattggtgtttatatttacaactgtctttcaatatacacaaggaattggttctgggacccccatggatcacaaaatctgcagatgctcaagtcccttacacaaaatggtgtaatattttcatgtaacctgagcatatcctcctatatactttaaattttctccacattatttataatacttataaaatgtaaatggtatgtaaatagttgttatactgtatttttatttgtattttttaatttttttccaaatattttcaacccatggttggttgaatctgtagatgcagaacctgcaggtattgagaactgactatatatatgttattttatatatataatttcttatatatatttatgtaatttataatacatgcttatattagaaattatgtatgtgcacaaagcaacaactaactgttaacactggtataattctttcaagtttttttcttctgtctgtgtacatatgtatattctatctgtatacagttacttggctcaataccatagatacattttgtgtctgtctttgtataactaatatactgagaattttctggtgtaattagaaacaaagggaaggctgatagaactggaggcgaagagattagttaggaggctatgtcattcctcttgatgaggtctcagaatcgtgaggatggataatttcagagtaacaaatggcaagatttggagttttatttgatgtaagtgtatggaagagaggaacaactatcatatgcaggatgactctcaggtttgagtaagtgagtagatgactgtagaaggaagaatcctttggaaaaagagataggaaagatgaattcagttaccgacatgagtttgagttgcctgtaagaaatcaaactgcatttacccagttaaccaggctattctaattcaccaacaaagtgaaagcaaaagaatatggcctctgaactctatgtgctaaactatatttagcttccatgttcggaaagcttagtgaattattaagggggattatgactcctcttcccctagagatattttgtaagtacacacaagcatttgtctgttgtgttttgaaaatgaacttgccaaggcagggcaattgccagcccagacaacctgtcaagagctcttccagagctctgaaactgtgatacacttagatttatgtttcctctgtcacatgcttttattgtaccacagttttcctaagtgttttccctttgctgagcaaataagaattcattgtaatttactaaattgtgttctctccatcctaaaatcaaatgctgagatctcatattaacataaaaagtactgatgattcaataccttatttttctttttaatgtctttccatccaagaaagttataatattcacttaaagaaactgtatcatatgtactagccatgcatgcagtttttacatatttttacctatattttccattctctttactaaatttctctgcagtgtgattcaaactaagtactgaagtaaatgctagtgtcattaaaataaaatacacattaagaatgctatagtaaaaagtttggatactaagtaaaagtcagtttctaaaattaacatatttgttgagcaaatctgtaactagccctcacaaccagctctctgtcttatcaagatttagtttgctattcatgctcagacatggatagtaagagtggtaataacattagaagaataaattcatgaaagctgtaaaacctttttcagcaccctcccctccatcttcacaggtaaaattaagcattcattcaatcataagtcattcacagatacacctgttatgtgttagatatcatgttaggttctggaaatataaaaatagaaaagaaatgagaagtgccctcactccagtagtagagacaagcatataaactgatcatctaaaaatgcgagatccatacccatatcacaaagcattataaaggcatctaactgagcatggagaagatatggaatcaaataaagaatcctggagagcacctgagctgagtgatatcaaaggataattaagaagagttagccagatggggtggttgggtgagagagagtgactctcatggagggaggtgtgttcctataacttagaaaacccagttataggtacattttaagtaagcataaaactacatttccagataaaaatgatatttgtttcatatcagaaaaatgatgtaaaatagcaatttttactgtcatttgtatgcagatttaagaggaatattctgagatacagtttaagttctacagctagtctgttttttctcttattctttatttcctctaacttagtaaatacttccataattacaggtcaacaagaatgatctctagcagatatttagttactggcagttctggatgtttggatctagggttaaaccagaaatagtgaagagatgttttactggaaagtacttttggcaaactgtcagcgtctaagttggcaagcatgtctgactgaaaagctagaaggttaaatgtattaacttaggatataatgataaatagatttttacatggtctttggttgcattcaggagttgaaatttgttttcatatttggttatagcagtggatgcatttttaaatatgcctaccgataggacatcacttgctttctcaaaaatatagaaaactattgtgatgttgttgtagattagagttaagcttgcaacaattgtgtcatttgaactgccgatcctcaccatcagacgtggtgatatgtaggtcctgacagtcagtaaattgaaaagattgctgaattggactatttgggcacaccacctgaaataattcaaatggtcttaaatagcatttgtgtcagcaaggaatgtgttaatctcaaccttcattttgaaaacccatgtgagcttgtttccccttgagagtcaacatacttcagtttggcaaggcagtcttgcattcattcctcattttttcactcaatacactgaaaatatatggttatattcactgtttttgatcattttcttcaacactgaatcaagctcagacagtactgtgcttgactcttggctcttctcaaatgaatgaaatatctatattgacattttttttttttacttctatcttcaaagtgccaactttcccttctgcataaatatctgtgctcctctagtgttgaatccacctgcatatgtagtcctagctctatggggtgactggtaccaaaagatatggagccttttgccctgaagctgattctgcacatctatcaagagcatatcctctgcacattaatggcttgttcagctgttaaatgaaacgtcggctactacttccaaaagacagggattgataacttttccacattgtatggctcctctaccttgacattagacaatgtctagcattgttcattgatgtagacattttgtaaatagggtgtcctgattctttgagtgcataatatttatcattaattttatcaggggccaactcaaaagtagtgttgataggttgggcatggtggctcacacctgtaatcctagcatttttggagaccaagatgggaggactgctcgaggccagaagtttaagaccagtctggacaagatagtgagaccctgtctccacaaaaataaaaataagtagccccaaaaaataaaacaaatcaacatggtggtgcatacctgtagtattagacactcaggagactgaggcaggaggattgcttaagcccagtatttccagattaaggtgagctatgattgagccattgatttccagctagggcaacagagcaagagcctgtctctcctcctccccccccaaaaaagtagtgtgtatacacttgctttacttatgagagaatcaattgaagtctctgttttttcatcctttctcattttgggggaataaaattatcaattatatcatggaaaatgttttgttcttgttctataaacagttgtttgctttactacagaggttactgggcttgttttgaaaatggtgaaaaagtcaatagatttagcccactatttcaaaatattttattaccaacagttcactgagctctaggtatgaatggatcaccagtataagaaaatccaagttttcaagtatttaagttgtgcttcctttcttgtctttctatcactgcttgttctagcacaaagagattcacattatattttgacactggactctgtcgttatggtaaggagctagcttatgttcattaccatttttagtcttgatgaaccaattctgagacattgatacctttttaaattgttgtcatatagcaagaaaagagtattaagtttaaaaacacatttaacatatgtaaataatgaatacaacttaaaaataaggtagataagacaactgtatcagaacaatccttgtgcaggtgtgagccattaataatgtaacaattattaataatgtatgtgggttacattgaaaatcataattaattttacatttcaaacttttgaaacttgtaaaagggcaagtatgacaagcataggactcatttagaaggctgatgaggctgttcatttgcattttgctactctaatattgttttacaagctattgttttaacagtataaattaaatataatcattgacacatggtagttttttttaaatgttcttggaaattatcattctgttctgtgtattatgagctaaatgtttgtgttcccccaaaatccatatgttgaagccctctactccattgagatggcatttggaggtcagagtttggggaaacaattaggtttaaatgtagtataaggatgcaacacctgttatattagtgtccttatcagagaaagagatgtgaactagctcattctctgtcgtgtaaggacaaaaatagaaggcagctatctgtaatctggaagaggtacctcatcagaacctgcccttgctatcaccccaatctcagattcccagcctccagaactgtgagaaatatatttctgctctggaaaccacccagactatgatagtttatggaagcccaagcagaccacaacactgggaaattctttgtatatcattacttacaatttccagatttttaaatgtaaactctgtgcagtgttaaagagaatattgtttttgcatctgtcaaaactgaatttgaattctggccaggtgaagacaggttatggcaaggtacctcaccagaggtactatcaatacattattcaatcccctatcagtaagttagtcaatttcctcttttgtaaaatttagcaagggaaatctgccatttagagttcttatgggtactaaatgaaataatatatataaagctttttccatggcacatagtacgtaccttgttgcctctactctctttttctgcactaggtacaatcaacagtcaaattttttcttcttttgttattttattgcatttttattgataatgtcttagctattttttattcactaaaatgactgtattagcttgttattttagcgtcatatgagggaaacactaaacttagtacgatttttaaaaagtcaatacaaacactaaaacaatgttggcacttaaagaatgtgctttaggaataactaattctgagtgaaatttgtgtgtgtgtgtgtgtgtgtgtgtgtgtgtgtgtgtgtgtgtgttttgctatttagggatttggtttgtttttggcatggcctgggacataatcaaatggttgagagatcactttctgatccatgtaaaattaaaagcaaattgcaatgatgagatggttgacaaatgaaaagaaatatgattatgtcaaggagaaaatagaggcctctcgtgacacagtccttggcatgtgcccatgtaggggactgctgtcttgctcatcaggaggtgccatctcaattatacctctccatgtgaatccttgtccaatgatgcagatccactctgagagagtcaagttttctattagagacacttgaaaatcttcatctctcaaattgttacaagtattatgatttaatacagatatttttgttacatttttaaaagaagtttgatgacatagtatgtatgtaacttaaggcaaattgatatacaaacactttttctttattttaactttgatgaaataactgatcattcttttacttaaaattatatgttttttactcaaatacaaataattttaaagaccttgaagaaatacaatttatttctccatcactttttacattatacagctttgggctagaggaattaatacattattctgctttaggggaagtgtttcaaaatatttttaaaatatgtattcctggtatacattatgccttggtgcatcagagaattgaattatagttttccttagaaaatgtatacaaacaatgtgttctcaaagcatgtaaaagaagaaaaggaaaaggtgaaactgtcatactgtaattgctgagtaccacattttcatgattttcttaaggccttccatttatgctataaatttcttctaaaaacaaacaatttatatacttatatattatataatactatatgagataaacatgtactagcaagttatgagtagcatcagttgttgaagtataattacatggattgcttaattttggttatttatcagaatgtattagtaaatgtctagctatgttgtcttgtatttaagacaaatcattctaatttcagaacaatccaaaaattagccaagtggatatttctttaaacccagttttgaagaatttatagtaaagtacctctgttaggccctcagatcatttatacttaccaaattcttttttatttacctttacaaaaaaatactaaaatattccaagaaagaattaaagtatattggaatgttataaatagctacagtttgatcatgacatttgggtgctagaaatgtgcttgagctctcatttatattgaagataaataaacgactaaactttttaaacaattctccccatagttttacattcaaaagaattattgaaatattcagtactaatgttaaatgatatattgagaatttcacttgtagataaaaagacagtttgcattcatgtatgaaaatgagtgggtaggcccaagggatttggtttagaggaaaagctttgtgtttagcagcattgtctattcttttgtgtagttttctatatgtcacacttctattagattttagtgcttttttttttcaagttagttgtttttcctagcgctttacacacacattttttcaagcacctgaaaatgggcaaagtaatccagaaatcatgcttttttcccaaaattatttagcttgacattttgaaaatcaaaactcaatgcttttattttctacagagggagtagaagatggataaacagccaaacacttaattgggtttggggaaagaaaaagaaacaacaacaaaactaaacgattcttcccaaaactctcaagggttttatttttataagtgataatgctagtggaccactaatatacaactacaataaagttaataactacattttattcataaagtttgccaggtaattttctatgtactttctattatcgcatcttattttatccttaattcaactctataaggtagatactagttttttgtttttctcatttcatagatttgggaaggatgtctgtggatgttaagtaacttgcactaagttacctgtagtctgattccacagcctgttcactaaggcatttcatatacatgtatgaccttttcagcaatggagaaaaacacatagaagccaggaaatactcttgtgaaacttgttctaggctattatcataatcggagtggtaaaattaaaagcagtgtacaatgagacttgatctccagaatcatagaacataagtggcattaaactcaaggtaaatggtaatgacgcaggctgtaaaaactaactccttaggtctccatgtgaatgaaaaagatgtttaatgtgcattaaatggcagcatctgttctagagtgtaacctgaaaaaaatcagttgtttatgaattaaacttagttagtgcagggcatctgatttttaaatgggaatatcaagtaacctaagacaccaaagatctgttcttcctatgctatgaaagtaacatccattgatttcagtaattttctttctgtcttcatgagttttattttgatattttatgctcaaagcctttagatttcgtaacacctcctttagggtaaaattgtttaaagttaatatattcatcgctttcttactctacacttagcactgaataagaaataagtgaggtaaggccgggtgcggtggctcacgcctgtaatcccagcactttgggaggctgaggtgggcggatcacaaggtcaggagatcaagaccatcctggctaacacggtgaaaccccgtctctactaaaaatacaaaaaaatagcagggcgtggtggcgggcgcctgtagtcccagctactccggaggctgaggcagcagaatggcgcgaacccgggaggcggagcttgcggtgagccgagatcgtgccactgcactccagcctgggcgacagagcaagactccgtctcaaaagaaaaaaaaaaaaaaaagaaataagtgaggtaatacgtttcttgccctagagaaacttgctctctagttgagaaaacaagagaagtatttgaaagatcaagaaacaataaaaggcaattaaaaatgaatatcattaaactagtttgatattcatgatagataaaatgttttaagtactcttcagattttcatctttatgtttacactttcttctgtccaagacttttcacctttggaacatttcaaagtttcacaatgaccttttcctctcctctcagttgatttcaccaagtaatttgacatttttgttattctaattaatatttttactttgcttctttagcattaaaccatgttaagggtttttctagagcattaccctggtcagttgtttaaatctcattttataaagacattcagacataagctttcgttgatggcttttctgttaccgaagagtaaccttcaatcagtaaaaatgtgtaggtcacttatatgccaggaacttactgactaaagaatacacaatgatccattctatttattcagtcagttatttatcagctcaaatatgtattgagcaatgattacgtaccaagtattttagtatggaaagacagaatataggccgggcgtggtggcttatgcctataatcccagaactttgggaggccgaggcaggcggatcacgaggttaggagttcgagaccgtcctggctaacacagtgaaaccctgtctctactaaaaatacaaaaagcccggcgtagtggccagtgcctgtagtcccagcaactcgggaggctgaggcaggagaatggcgagaacctgggaggtggagcttgcagtgagccgagatcgcaccactgtactccagcctgggtgacagagtgagactccgtctcaaaaaaagaaaaggaaagacagaatgtaatgaagttaagtaaaatataaatgattttagatggcaataattgcttgggagaaaaatgaagaagtaaatggatatcaaggaaagcttcattaagaaggtgacatttgaataaagccttacaggaggcgaggaaaggagacacatgaatatctggtagaataacattctaggcagagagaaaagcaggtacaaaggccctgcttgggacaagaagcgtagctggcatgtttgaacggagcaagcaaggctgagtagtaggtgctgaggtcagtgcaggtgagatggtgtggggagacaccatctgcaggacctggccttccactcctactgtgattcagatgggaagtcactgggggctttttcaggatccctgtaacaaactgtgggaagacaggtcaaagaggaagcagggttcatttgatatggtatggagagtttcactgattgcagccccaggtgataatggctaaaatgaaataaatagcattggtggaagtcatggtcaagtggacagattctaatctaaacatcatgcagggggaaaaaaagaattgtctgatgaaaaggatgtgatgtgtcagattgaagtgggagagttctgtgacccctatcgcaggatgttcaacaggggtgtggctcacctgttcagctgaaaccccttacaggagggggaacatgcagatgggcaggtgcaggaaccagggtgagcacttttgggctctagccccacagtagcaactaggggtgggtgcctgtgactcctgaagccccagtgggtatgttacagtgctccttatctctgccatctgcagatggcttaagtgttaatcagctcagtgccttcttggtacccgggtctttgtctggtgtccaggaagaatcaggtcacacaaagacttgaaggatggtgaatgagggggttttattgagtggtagtggctctcagcgggatgtatggggacccggaaagggggtggagtgggaagatgatcttcccctggagtttggctgtttcacggctgatctcctctccagccttccccagccaagctcctcaacatttagacactccttgtcttctctccttctctgccgctccactcttctgttcctctgttcttctgctcatctgctcaaggaacctggggtttggtgttaatatgggaagaggatagggcagcatggcaggccaaaaggcaacatttgggtgcaaaaacaggaatacctgtttccatttagggccacgtgtttccaggcttgagggtggggcctttgctggggaactgccctcttctacccagcatttccctgcctcttgtctatatcaagatgaaggaaggcctttggatgattctcaggtttttgaactgaactggagtgactttactgagataggaaagcttggccagggaacatgctatggaatcacattagctcggatttggagattttgtttgagatactcattagaaaattaagttgaaatatttggtaggtaattgaatacatgagtctggagttcaggaagaggtttagctggagattaacattcaaaagtattttccttccccatgcacactttcttccacctgggatgaatggatatagtagtagataaatacggcaatttgaatagaagttctttcctgtctaaaatggcagggaagattttctgcaaccctattatttctgaaggtccttcataccccctcactttacaatgaaagcatgtagtcatgttttggaaaagaccacatttgtaactcctgtggggacacgccctatttttcctgtcttaagacttttaaaattttatttacctcttttttccaacagtgctttgactttattacattaaaataaatttacctgcctgtgggccttcacttttatcacacagtgagttatataagaaaaggagtcatgtcttattcacctttgaattctaagcaagtgatctggcctctgtaatttcttgctaattatttgataaagatacttgttcttgacatttaaatggctactaggcaactgatcttggagtttattctatatttttaaaatctgctatatattgcaaacatattagttgcttgttttaacatttattgagctccatttcttcaagactcagtttacataaaccatttatctctagagagggcatacgtgttaatataggaggcccaaacacccaaatgaatggaagacatgatgcattaaatgctttaataaaggtacagattaaaacattatttatcacattgttactttgtcagacttcctgaccaagctgtcactgaaagaatagtatattccaactctacattgaagtgtttcaatagggagatcaatagtggggaatgtattctgattagatggaatgaaatagataatggtacatatgttggacagtgctacattagttttggtagcagatgaatacattggcaggagtatagggcattgggagaatacatgagataaagtggcactatgtgttagaagatctttgggctctagggcaaaggcattttactgtattttgttcatcctaggaaatctctaacaattatttggatgtgaacaggttatgtaattagaactgtactttcaaaggtctagatgaaaaatacactatgaatattaatggtagcaagatttcctaatagttcaggtgagagaaagttaggacctgaatgaaagaaaaagacatagaattgctagctattatattaaatgatgtattaagtagatgtggtaacagatgaggtactatgtgggaaacagaagagccaatgatgtctttaaggttttagtctggaaactaacatccttaatagaagcaggaaggttagaatgaggtgcttgtggaaaatgatgatgaatcttgttttaaacattatattagcatccagatggaaatccacaggcagtttgaaattcagagccagaattcaagagctaggttggaactggtaatttagatttggatgtagaaaaaaatgtgaatactaagttagtatattcacagaacaaacatgaaataatctcccagttcttttacacttttacacacttctttgtttactattcttctgtgaatatttatacagattagaaccttctacataatacttcaaaatgtagccctaccaggacatatttatggaaacaaaggaaaccagtcttctaggttgtcgtttctatgtgttgttaacattttgtgatttcctgtggaatggaaccctttgaaaatagtagtagattttaatagaaaatatcttaattaaataccttgcataaagtatttgagacataaattacttttttacttatacaatttaaggagattttattttcttctaaggccactataaaacacactggaacatttgactaaccctgtagactggctcgagccagttcatgctctaacacttacttttgaataccttttcaaaagtaaagaaatgaattatttaggtatatatcaagaggaatttccttttatttatttatattctatgtgtcttcatatataggagttattcagctctgagatataatcaattagaatattgaaagagatttcataagaaacaaagatcaactaatgttcaaaaaattacaaacatgaaaagagaaaggtgagattttgacactggaaaatattaggctcccctaatgtttcagtgtatggatgtttattaaaatttttctggacaacctcagtccttaaaattactggacataaaatatatagcagcactatgaaagcttttaaagtgagaatattcataaggctgagtttgctatgattttaatagtccctaagttatttcctaactttcaaatgaccatatttattctagtaatttaaaaaaatttgtcttcattccattatctcaaaaaagatcatgactcttccattttaatatgttctcagattttccaggtagaagtgaaggagttcattattcttatctttgtcaatttcctaatttacaaatgagctgaagcaattaatccttgcaagtcgcctgtattaattatagtctaaggcaggtttatttgcagttttgtaattctttttgtcacattttcactgtgtttactatctcagcttgatgcttgttgacatgctgattcatgttttggtgcactagataggttttattcatctagaggaatgagtataaagaggtcacaccttataatcacactagcatttctagtatgtgcaggccatatatctccttttaatttaatctctgaaaaatgtacagggatttctgcagctaagctgtacaaatcaataaaatttataatcaaggctgtctaatctctaaacctaatataagacttcacaactattgattatatgtgaaggatctgcaagctgttaatcatgcatgaaggcataaaataaatggtggcttcagaaaaggaaatggacaaataatcatcaaccctgcagtccttatctgtctctctattccctgaagcaagcatgttaccagacacttacattttataaaatcaaatgaggtgttaaagtgtgtatcaatagtcatgctgacttttgtatattatatcctgtttctattataatgtagaattgttctctttatcttccagatgtgtgatgaaaagcaaattagtctctctaataagtttctagaaggaaagaaggacctaagttgatgtgttaaaatcataatctttctaaggaacaaaatgagaagaacatacttggaatatcattataatgtaattgtaatgatttatttgggggaggggagaagagctccatgtcacgagatagtctcacttaaaactgggccctcttagcattttattaactagtatacttcatgatgattttactagactgaattgactgaccaattcaaggggagatataaaatatttacaagggagttatgtagttgagaaaaacatgtactatttatgcacctaagcagtattagagggatttggataaaaaagaaaaaatatatatatatatatataaatgtattattttctgtcctattcagtcaagagtaaagaaattccaactaacagattctcttatatatacctacaaaatcatattgacataaaaaagttaaatttaatcaatgttatattgcagtgctggaggggtaagttactggtaacctactacagtttgtaataaagtattgatatgtcttattatttatagaattattattccaatatttagtttattattctctgtgggagtgtagtgaagaaattaacccctcctcaaagagcatacagcaagcgaagacaaaaatatatccattaaaagtcgttttaaggcatataccatactaccgtggtatctgggacatttaagcacttaataagtgttttctattattaaaaacaggatgctatttaagttcagcacaacagattagtatagaaatgcaattcttaaattactgtactattttagtgtagatatcactgatagaatcttcacataaatattaaggtaatttaccgaatgaagatattagaaataatgcctgtttcaaaatgctgagtaacaactaaccacaaactctcatcagtggcacagagcaggcacgtattaattatacttgtgggatggttgactagtagcctctgatgatcttggctgacttacatatccactgatggactggctataggttggcttctgctggtacgactcgggtaacttggctctgttccacatgtatctcatattctagaagaggtatgagcaagcaggagaacagaggactttttgagatataggctgacaactagcacacccacacttttgccttattctgctgaccaaaacaagtcacacagcaaggccaaaatcaaagcatggggaagcagaccccatttggtgtgagcagttgcaaagtcacatggcaaacagtgtgacaacaagaagaaatgaataattggaattatttcaactgccacagagaactgggtttttaggtttcattttcattagcttttaagcttgaaacatattgaaactacctgctttattgttcagaaaataaaaatttccaaccatatactatggatcaaccactgtacttggcatgcaaaatattacctcatttttcagaacaacataagaggtaggtaatttatcttcttttagggataaaggaggcattgaaaatcccccttagaattttgtctttgctatgtacagctcctctaaagtcaccttactttttacactgtatattatgaagcagtgttttccatattacatttttttagggttgtacacaaatcactctacctttttgtgtctatgatttatactgttgctaaaaaattttatgaaaaataaagcttgatcctacagaagtagattattctcttcttattttcttctataaattaagaaaatatatttttccaagtatagacagttacctatttttaagttttatttaaataacatgtgaatgtgatgtgcaatatcagagatgaatcgaagtggattcattgattgtagttacatatttttcaacagtctaataacattaccaaaaaatgttaagtgaaagacattaaagggtctccaaattttcagtcaccgtcattttgggaattaggtctgatgataagacatttagtgggctttatctatctattggtaaaagaattatctttgcctttttttccatgtcacttgggtagtactgtcctttaaaatcaaacaatttccttggcattaatgcagagaggatccaagtgttaattttattaaaattatctgataaacttcagtaagagtgttgagagcagtggtgatgacttgttttgtttttaattgatgatgtgcttagtgtggttctgatggcactgggtaaatattactgtgattctgcaggagagctgagtgagccatccaccctctgtcactttatatccctcgagtccaagcatgtcatttcagcaacacagccagaaagcctaaagagctgacagttggcttgtgattattcctggacctgaggctccctcacgttacagtactaatcaagtcatctcaccgacttatcattaactcaatttgacccatgggagcagagatgaaatctttttggcaagactaatgatgctgtaacattgaaaagaagtgaaatgtaaaaccttgattatcctcaaccctttccatgaggaaaagaataaaaattacaaagcacctaaaggtaagagtaaaagacaatgtctttcaaagaccttaagttttccttccccaaggtgcagcactgttttctttgcttttatttttatttttttatttcacctttgtccagaaatttcatctcaattcttttttatttacactaacaaatattttctctggcagtcagaaaattcacttttcttgtatttgttttgataaatggaatgaaagttctgttttgcagtcagcttctaagatttctgatgaaaaggcagccaggagcacgaagctcctgtcatgcttcagcgttcttagtttgtgtacatctttgacaagaactttcttttttttatttttccttggcacgagctttgggacatcttctatttttctctgactgacagctgcataataagttttatcattaaaaactgattctagggaaatatgatccctgccttccattctcttatagatgctaaagcttttgttttcacaactctttcagaataactagaaattatcgctacaaaaagacagggatattgacctgtcatgtcctgagttgtttagcaagtgccaaaaacaaaattaaattcccttttatctgttatctagaaccacgtgttaaatcatcttgctcttgagaggtgactcaaagtcaacaggttctttttgttcatgttgtctttacttttattaacctttagagaattattaagtacttcttcattttagcctatcaagttgggttaaacatttaacacataagttattacaggcataaataccatacttgatctatttagaatttaagtgggggcagtgatatgttacttctttatttacctgctaattatgtaatactgaagatttaatatataaattttctgacatttctttatatttcatcctgatttcatgtagcctttctcactgtaacaattaagaattaggtgcacaataaaaggcaaaaaagaagtaggaaaagttagtaaaacttgctgatcaacatttgacagggaagataaagaaaaccaggtaatgttaacagttcctattgaatatatgtatttttaatttaacagttaactgttttccttggacttactggaaatgaaataatggaagagagctttatgcctttgtttgtagataagagcgtataataaaataagtcaagattcatcagctaaagagtagaatggaagagcactggattttacttctggttccagtccttttaccagcttcttaatgttctatctgcactccccctagcccctgactttgttcttcaagtatatgaaaacacacaggaccttcagccttcttaattcctctgcttagtcctatgtcatagctttttcccagtctgaactccctgattgatggggtgtccaagggaaataaacagtcatgtcatgggttcttagtttctgtttctggttgggccaatgaaccccttcctcatccctcttttccacttatcactagaaacagaaactaaaaaccatggcttcaggctgctaaaagcctaaagcaaaacaacagaacaacaacaaaatggggtaggttggacaagcttgagtacactaaacacaaatttcaaaaaagaaaagtagaatgacctgagaaagtgacatcatggtgtttctaaagttataagttgacaatttataaatgtataaatgtatgggatacaaagtgtgttataatttatgaatacaacagggaatagtgaagtgaagctacttatccatcacctcaaacacttaatattttgtgttttgagatctggtttctggtactgacctctgcttttgacttagtgggtctttttagaaaagtcagctttctttcattcaattctttttttttttatctgaaaaatggggcagacactagattttatgcaattctctttggcctctcttgtgaatgaatttgtaacatatgtgcttaacaccaccttcccttcaaactcacctgccccctgtcatgctcactaacacatgctcatctctgtttctgttccgtttccctctttctccctctctctcagagcatcctcttctctccatttctcttttgccctctcctttttcttcttctctcttttctcttaccctatccttatctattaccttctctctttttctttctcttatctctgaaaggatgggagtaccccaactcctgacttaggtagactgatgcctccacttagacctctttctcttcttaatgctctccaagttatctaaaacacagaaatcagttcaagtattgctcgtatgccttgcttcccagctagggacattgtcaaattgatctttgcctccttagtttctagtatactttttggccaacagaaagcaataaataagcagtaagaaattattggatcattttaccccccaatctgtgtctcttcttgaactttctctgttcatttaagagcaccttaattttctttgtcatttggtattaacacattagctatattgtatccattcacataactcaaatccaagtaaccaccaagtttttcagttttccttccacatcagtagcccctatcctgcgtgttcctgctgtccccctccttacttagccctaatctctctgctaacacatcacattcttttgatttctctacattcaatgtctccacaattgacacagcctccaaattaatcttattaatgttattttactatgttaacttcctgctcagaaaccctcaatgacttctcatggcctatcaggtaagttcagcctcttaccatgacatctaaagtttgcctcatcttttcccaaccaacctttcctgtattatctcctatatgatacttgtacagcaaccaagtgggattgcaaattttctccaactgtgttctacgtttttattcaactcgtttcttccattttttgtattatttatctaaatgaggtctaaagatcttgcttctatccattgagacctaacacaaatgtctactccatttgaaaggtggaagttatttctccctcttgaattcctatagcatttttttctacttatataccacttgtaaatatattgtttattttttttcttagcttaacatctttgataaacaaatggaagctccttgaggtctaagattatgctttattcactttagtaccttctagaatacttaggatagtacactgtatatagtaataaaatttctttatgtttcattatagatggatgacttgatctaaacattgaaatataaccactcattgcatgaagatcactcgattactgtgtttcttttttccttttttgttttttgttttgttttgtttttttgttttttcgtttttttttttttttttttttttttttgagagagagtctcttgctctgtcacccaggctggagtgcagtggtgcgatctcggctcactgcaaactctgcctccagggttcaagtgattcttctgccccagcctccccagtaaccaggactacaggcatccaccactacacctggctaattttttgtatttttagtagagatggggtttcaccatgttgctcatgctggtctcgagctcctgagctcaggccatctgcccaccatggcctcccaaactgctaggattatgggggtgagccaccatgcccagcatcactttgtttccttccaagtttctgataaaatttttgactacagccttttccaattctttctttttactagaaatgcaaaaaacaacaaaaaaagaaatgttatataaaattacaatatatggaatacccaataaagatttgaaaaaagaaaatcggaaattgaggaggagcaagaacatatatcatattccaaaacgattgacagataatgaattcatgaatgtgttctccattgtttcaccaccattatggttttttatttgttataaatacgatttactatcatacctctgagtcactgaccctgtaggttatatcttgaagttatttaatacttatagtagctcttatggccagctcataaatatcagtggtttccaaacaatatctttttgctttcggttattctatggcaattcaagtaattattttgattttaaatgttaaatttttatttatgtatttatacctcagaaatacaatgcagttgttggttaggtatgagaaataatggattaaggtcaataatttaggcaactttattgttggaatctttgagaaaaatttctttgaatggattttatagtagtagaaccatctcaaatcactgctgtttataaatattctaatataaaaatgcatgtgcatatagttatcagcccatgtctaagtgaatagtattcagagaagtttgtatgctatagcacctttcacatgtatgtgtatatacacacatatagatgtacatgtatgtactgcatatgtgtatatgtatatgtgtgtatctatacacacaaccctgagaagttcccacctcagtaaaaactgaaaaaatttaaggtgcatgccaattaagaaaaaaatacagttatacagtaactccctctgagttattaattccacgcagctcaaaacaatcaagttttgatttttagtctgtgtgtgtgtgtttactttggttgttcatatgtttctgagtactatcctaaagtgagtgcaaaattatgtctaagtcactattttatcaacatcagggccctttaaagcatacattcaaactgtggaaaaaaatgtcaatttcaaataacatattgactttgtcaattcttagaaagctatttctttccacaactctttgtttttccatatcagttaataaagtattggtcactgaaattatgattgtgctttatatacattgtgtaggactaataaagctactctatcccaattttaaatgagtttttaatacaatgagtgccaaagtaagcagcatttaaagacaccaaaacaaaattatcacttaaagtaaatcctatccattttctgcataacagataataaataaatcatttgcccactcttagatatgtaagaattgaggatgcagagctactctgtcttctttacagtgtgtaagatgtctaggtatgctttcaaaatagtgttaaaatgcagagtaagtgcggactaaatagacaaaatgaaaagaactggcgtgagagagtgatgacttagaaatagagaaatttatacaaggggaaaatgtcagatttaaaatgaggggtgtgttaaaacaagtgtataagtgctagacctaaaaaaaataaaaaattaaagaattagcgggttaaatatttgtggtgtttctctcattgctgtataggcattgtttgctcatatactctaggtattttcatgggaaatcttactttctcattctgtataattttagaacaagatatggctgaatcttgccatggctaccaaacagtatccagttgctacctaggaggcagcaaaatcacagtttatctgggaatttttaggatgatcctagttctcattgcctggttagctggtgggcagtcatagcaaagactgtgttttcggtctaactggactaaattgaaagtatcatcactttactcttgtgtctggtggggaaaatcttagcatagagctaaacatataaaacgatttttaaaataattagaaagcctcgtctttcttccaacctgtggacttcaggtaacgtctgaaatgaaagtggtgaagttgggagtctggatgctgtgaatagtcataagactggcaaataacatttaaaacctaagcattagattctaccgaagataaatttgcacatatgtagatttttgtaatctaagattttaaattaaatggccaccagagttcatttcagattgcacattaaatatattgaactagaatcccagtttgggcttgccatctgtttagcatgctgattgtttttacagaactgtgattttaatctcaaaaacaaaaatttatgaaagcccccaagtcagactttttgtattattttccctactgatttccatttagcaagaatttgactatctttaatgagttaagagaggcatcggaaatcccttgacttttttctttttatcaaatcaatgaattaaagtttttgttgtgtgttagtttttttactctgtagatgttgccatggccatgagtttcatagagtagttacgttgattaagttagatgattcaagttagtcttgaatgaggaaagaatacacttgggaagcagtgaaggatggattctagtctttggagtctttagttctgccagtattttccagttgaatggaaaattcacctcccagtttggtttgggtgacaatgaaaggattgttagacctgaatgttttctagaaaaagacagagatcaataaggaaagaagacaatgtgaatatctacatatgttcttgtaatttttctccattgttttttgctttgatgaacaacatcattatagaaataattaatgttaattaatatctgtgtcatttcttgtaaatggtagtatattattgttacaattagaataattcgtatacagcatagcttagtgacatgataaatgacagagtagaatatgttgagtcttatccattttgatatattagctgattcacttgctcaataaagacaaaagaaaggcagagaattgggcagtaacaacagcaacaactataaatgcatggcggctacattttcaggtttttatttttctgccaagttcctgagtaccgtgggttgttgacattttatatttcttttcttttcctgttgttaaatcttagtccctgattgaaaccttcaagaataggatcatgaataaataaagcaaaggaaaataaaacatgacttccacattttctagatttgcatatgctatattatacttggtgttttatttttccaggattattcatgatataatagacagctgtctacaactctgatttatttttcagaacctatgagaaccccaaagacattaaagattgctgaaatacaggcaagacggattgctgtggactgggaatccttgggttacaacattacgcgttgccacacttttaatgtcactatctgctaccattacttccgtggtcacaacgagagcaaggcagactgtttggacatggaccccaaagcccctcagcatgttgtgaaccatctgccaccttatacaaatgtcagcctcaagatgatcctaaccaatccagagggaaggaaggagagtgaagagacaattattcaaactgatgaagatggtatgctcatactttgctgtttaaaaggggggaattctctaacaagaaaaatgtgattactttaagattttcctaagattgtccaatactgaattggattctgaaatcatctaaatgttattaatgagattaactttggaaaaaaattgccttttacaaaacctaatattcttcagacaagcatccaaatactaaatgaaatgtgcttctgttgtcctctcttcttacacagaagtggcaactacactaaaaacttaaatgaaggggttttttaaatcaaatgttcaaaaataatttttactctccatggcactatatcaattgcctattggtaaaatgcacttgataaaaaacttagggtttttgtattttataaaccaatagtagctgtttttatttttctcacatttgaaaacaacactgttgggccgggtgtagtggttcatgcctgtaatcccagcactttgggaggccgaggcaggtggatcacctgaggtcaagagttcaagaccagcctggccaacgtgatgaaaccctgtctctattaaaaattccaaaaattaactgggtgtggtggcgggtgcctgccaatctcagctattcgggaggtcaaggcaggagaatcacttgaacccagggacagaggttacagagagctgagatcgcaccattgcactccagcctgggcaacaagagcaaaactccgtctcaaggaaaaaaggaaacaacactgtttatactgcttaccctttctattcattttagatggttttatgtgagtctaaatataaaagcaagcaacagttcatatctgtaagtctaatataatggcctttattagacattagcaagctgttctttatgtatcttgttgccatccaagtaactaaactgtactttgtctaatttctgtgtgttacttcttgataaataatatgaacaaatatttatattagtattttaatgttcacatacctgttatagcactacagtatattataatttgattgataatatatttcctaatttagcaaaaacatataaaaatatctgcaaatgataatctaataacaataagtcactctttggatgtaagatatttcctttcaaaatttccttttatgaattaaggcatgtagaaaaaaagtgtgccatatggtgaactgaggcaaagctaaattaggagtcagttcttatctttcaatgaagggcttaaattaagtgatctctgaggttccacccccttctaaacttcttcttaagtagcttgacagtagggctacattttttttcttttcttttcttttttttttttgaaacagtcttactctgtcatacaggctggagtgcagtggctcgactcggctcactgcagcctccacctcccaggttcaagcgattctcctgcctcagcctcccaagtagctgggattacaggcacctgccaccatgccctgctaacttttgtatttttaatagagatggggtttccccatcttagccaggctgctcttgaactcctgacatcgagtgatccacccgcctccgcctcccaaagtgctagggttacaggcgtgagccactgtgcccagcggggctacatttttatttgagtttcataaaacagaatgttttttataaccacgtattcccaagttcccttaagttctgaattttagatcaggtgtgtcttttggtgcctaccttctattagcttgccataaaagaggttattatgccatagtttttacaaatacttataatttcaaactctcccactctgaaagtggaaatgaccatcatttcatgtgccttgctgtttttgttgtaataagagaagtgagagccctttaaccacatttagctcaaaatttgaaggaagcaatatagttcggaaactatacatggagttactcatgttcctaaaatttctgagaataaacctaagacttatttaagacttatttatgatgaatgtgcttttgtcatgtttgaggtaaccaaacatgattactttagctatcatgtttgaactggcacctaattgaagtagcaacaacatttaaacaacaccccctttcctaattaataaacacacaaatatccttatatcttacccctgccacacacacacacaactcaatgcatatttatgcaagaaagaatgattaggggtaattgtttcataggcacataataaaaatgagaagtctaactacagattcaatagctccaaaaaatttctatcttttcttttaaaatgggataaatgttataaggtctgtgtcacactaggcactttgtagcccatgtgttcagttattaaagtatattcacatgttttattgcctacccttaaaaaaaaaatcatgtcctaattggtaatggtagactcagttacatagttttgtgctgctttagccagtcactctctagtaatagaattcattttgatggtatttttggatatggtttgttagtttgcccttctttcccacaaacaaaagaatgcagccaggcttatataatctttttcatattgcattaaatttttaaatgcatttttcagtataaatatgactagactaataatcaaggaatgagttgctttggaattttaaattatgccctacattgatcaaactcatgactgtactatttatcttatctaaaatagttttgtaaaaatacaatgacattaactattttttgaaatattttaaattctaattttaatatcattttcaatcctagttttattttaatctctgttttgaataatttttccagttttaattatattaagtttcgtattattatttcatagtattgtcacaaactaatcccttctactatgagcgtaattttttctttttgtttaatatataatatttaatgattgatacgtaaactcttccatgaagtatttgcaagtaactctgtcttcaaatcagcatgtgagcttcactttgtacatagaatacttgatgtgtcttaatgttcctgagcagggaaagaatatctaaatcataatctgttgttggaaagatcgatggattatgatgatctgattaagtcagtgttactaaattattgctgccctgtatacatagaaaaagaataaattatcagccacctaataaaaggacataattttataaaaagaattctgggacatccataaatcatgagagcaaagctagaaccatttcccgccagaaccctaaggtagaatttctatttaatttattgcatacactttttaatggacgaacagaattttctgtatgaggttttgttttcattttttattccagcattcaaaaaatcaatattataaagttagctcagcagaaaagcctggtttggggacatatttttgagactacaaagctatttttgaaagtacatttattacattttaaaggctataatgcttatctaatataatcttgccccacccatattttatttccactctcttttccattttgagagttatattataaaggactttcaaaaaaagtagctgaaatagctgtcatataagtctcaggcaagggaacaaaagtcagcattctgtttccattaaaagttgttgatgtggaaatgtgaagtgacattccctgcaatcagtagactgccatgataatggttttagtaacttcatatagtatttacacaaatcataggtacagagagacattttctgtctataattgtacacatgatcttccttcaaatgtagaaagttattgaatctactttgtttgtgctcacacctcacctcacctgtttgtgtgtgtcttttagttcatctaagtatagttccttctctcatctatgatcatccaagtacacgacaagtagtatgacactctcttgtccacaactttgccacaaacttttgtcttacaaatgcaatctataggtacttgtagtgaattctattgtcaaaacagaaaaactgtaagagcatagaaatacaaaacttctagggaaggtacttcccaattctactcctttttcaatgtagaattatacaaatattttaaaccatccctattattgaacgatgttcgataaaataaatctatgccattttatggtatttgtaggctaaattgtgttaggtaaacataggcagttattataattacaatgccatcaaatcaacatttattcattaattggatattttgctccctttttcccccattagccaccttctatgagagatacgtaaggatgaagaaatatcttttccttcaatataatcataagtgtatgtcatttgcatataatggaaacaacaggtactcttgcaagacaaaccaatgcccatggcagccttagcaatagacacagatgtgcagaggggctctcactggccctctgtctggatcagctgcacagccttgctggtactgtggagcagggagagagcggatgcattcagttaacttctctcatagtcttcggctgacaatggcttgaacatatcttctaaagtttagtgctggcatattttctgtttattgtgggtttctttcctcaatgtatcaaattatgttgcctgtctcagaggtcatagtatcattcatagtctccttgtagattgaaataaatcctgctctcgtgagatatcattcagaatttcttgatgctcctagccacaatgcaatgtatttcccttgatccagtgatttttaatttatttcaatcctcacaaaattgctatatactttgaaactacatttctggataatgtcatgtgtgaagttcactgaaacgttagattaagggaaaatattaattaaaaactatgcttgcccaatattcagttgatattttcaaaaagaaacacattttttagccaagtaggatagatactatatattttaaaatattatcagaactagaaattggatattcatgtgaataaatagcagctaagtatttaaataaaatatataaaaggaaaatacacgatagcgaaagaattttttatctggtattttgtcaatagaagctggtgcatcattcagtgttgccattgtgtatgaccagttatatgacatttgcaaataaggactgaagcaaaggctcttcaaatatggtcatagctgaggacacttccaaagtagttgtgcagatcgttgagttctaaacaagtctgacattataaactagtttgattcttacctttgaataagtgaatttcctttaaaaggctgaagcagtgacatttgaacctatccatctgtaataactctttaaatatggtaataatcaacactgcctttttaaaattacagaacatttaatacatatagctataaaagtaaggttggctattaatggacatttcaattcattttgctatgtgattcggctttccagaccaaagagtgttaattattatcgtaatttattatttatcaactttgtttatggagactctttgggggatttgcataatcttcaaaaaaatctttggggaaatacagctctgttcttgaaacaaattacaaataagatcctcacgttattagaggtatacaacagaggaaactagactacataatttatgcatctctctaaggtgatagaatattcttttgaataaaaataactttgcatttctacattttctgcatcagaaccttatagacttgctttaaattctcatatatcgaagtaaaatcagagaactagtcatatagtttattttgtttttaaggacacatttttatttatttttctttatatttatttttaatcctgtttatctagcttatctgatttactttttctgtttctaatgtaagcattttcataacaaaaaattcatgtgttttgtagtgcctggtcccgtaccagtaaaatctcttcaaggaacatcctttgaaaataagatcttcttgaactggaaagaacctttggatccaaatggaatcatcactcaatatgaggtattgggagaacaaggaagttaattgaaatgtggattgaaggactaaaaggaagaagaaaggaaaagttagagggaaatatggaaaagacgtaaatgaggattaggggattaaaatcattctcctttgttttaatttacagattctttgattccaaaattaagcgtcaaaataaatattttgtatggcatctagaattttcaaattcttaaaaaatgcatgttttttgttgctgttttgttgatttagggaagcaggatagtcattatcagatttacgatggttatagtaataatcacatattaaaaaaccctcattttcctttttataaatttaagaaactcctatcatactgtgatttaggagaagccattgaatttcagttgtttcagagtaaggaataatacccaaaaagcaaaatagattataaagctgacttttctagagcttcatttcaactttgaatataaaacattatcttttcaaatatgagaaactaaaaaagaagaaatgaaagaatcatttaagttacacaaatgtgtagttctgttcctacatagcgttgattagatcataaatgcttaaatttctaatggctacagagtgaattatggaaatgagaatcactagtacaatgttatattttgaaactgtgttcacatatttgaatactatttacatgaaatttgttatataacttgaacaaagtacagaatatgttaataataataaaaatttgttgaaacactttctgtgtttcatatgcattaaagtatatggctataagattttttatgtacgcataatttattgtggtttttttgatggaagaaaatagatgtatattgatttggtcagctataactccggtgtatctgtagatagatgattgattgacatatagacagaacttcagaatgacagaaataacaatatcaacatgagaaagaaaagaagaaaaaaattaccattgactccacatggatgcccttgcatactaccttatttatacagagtttatttacagtttcttatgatggatactagatatgtaataaatgtatttcttaaaacagatcagctatagcagtataagatcatttgatcctgcagttccagtggctggacctccccagactgtatcaaatttatggaacagtacacaccatgtctttatgcatctccaccctggaaccacgtaccagtttttcataagagccagcacggtcaaaggctttggtccagccacagccatcaatgtcaccaccaatatctcaggtatgcaaatgaataaattacaaataggattgattatgccattggtttgtaatggcacatcctggagaatcacatataaaccaagtgtagttcatcttgcttgttgaacctttaatatagttatgcataaatgaaagcactttaaataattatttgaatatgaattatatgtccaaaccaaaacacatctgaaatagtcacttttgattgacagtggtcttaaaaaaattatactaaatctttattaaaaatctttcaaaattcattataaatcctaatagatcttatgatacttttgaagagttgataattattatggtgtcagacctttactctaaatgaatgttatcaaaaaaatggtagaagatcctttctctagtattatagtactacataccttgtttctgtttcattttccctgacattatgataattttaaacaaagatgggcttttctttcacacttaaaaatcttatataaatacatataagttttaaaatgggaacgtacagaagaattttaggttgataaagaaattaaactttacattctattgtagtcacagttgcacagtttgtatttgactagattgtttacagagcttatttctccttcagtcagatcatcagttaaacctgattaaattcttgcaaggagttagctttgtagtatgccctaaatctactaaagtttatataatgttttttcttatttaagattactaaaataaatacatattgtatatgtaaatgaagagttaaatttgaaaaataaattatttaaaggtcaaccacacaatgtagtaaagcacaaattttgactttgttaattctttttgttcatttgtgttcatttttattatagttccacatggcaaatattaatgatacatcattaatacccataaaatatgtctttcatttttttaatctataccatttgcattaaaaggaagacatgtactttccaaattattttgagtctaaaatgttacttgcaaacgtgttgagtataatacaaactttaaaaatttgtatcatgaataaaattagctattccattatgagctataattccttggaagagcatttgatttatcttaatattccaataaaaaattaaagtatcatccattatattataaaataacaatgttttaaaattgcagttttctttcctgagaacaattacaaatcatgaatttaaaatatgtattgaatcactttaccagaaaataagacttggtgatgttacgatgcactgagataggttttctaccctctggaattagcagcagtgctataattgagtaagatctttcaatagagacagctacaaaatttatataaactaacaaaactgagaacattgaacaaatgtaaatttttgagagccataaatgtttgtgtgtgtgtgtgtgtatgtctctcaaggctcagatactgtgtttgtgttgaacataaagtttataaaaaagaccagaacatccatctgattttttcttttaattattcaacttcacttttacttgtattaacctaagtgcaatgagtacttgattgtactttaaaaacttggttgcaatcactttatgttaagaacaattattaatcacatctaagattaataaatttatggttagtgtggttctcatcattacttgaacttttcagataatttattgtcaaatttattccctgagtccggtaattacatttctcagcatttaaaaaaataatttaaataacagtgaaatcaagttattgcaggcataactgttgggggaattatttatacatacacatacattcacatacacacatatacacacatacatactacatattgtgcatgtattaaattaatatttgttgtttctgcttcctaaaaaactctcagataataattaatcttctaatgtcactgctccttttcttccatctagacagtattttaaacagattattgaaatatctttctaagtggtatccctaccttcagacttacccatcttcactgcatttctatatctatctttaatccacagatatttccttcttaaatattttcgcaatcttgtatcttataatcagcgggatgaagtctaaagatccacttggtgttggcattcagggtccttctttgcatgactcctcccatcctctacttctccccatgagcccaaagttcccggcacagccaacggcttatagctgttaaaacgtaccatgccctttcatattttgttatcttcagatattctgcttcctttctcagaattttagttcatcctttctcttcctgatgagtttttaccctttttttaatatttggcttaaacatcattagacaccctgagccttctggtttcatccccccactgccaatactaatgaaaaaagtgtgaccccccacccccagaccatcatcaccaacatcacctgagaactgtctagaaataaacattgtcaggtccctccccagaaatactgaatcagaaactctagggtagaggggctataatctgtgtgttagaaagccctccaggtgattctgatcttacaagtttgagaaccactgttttggcaaatggtcttccacttttggccactaacattttgctataattttttgtttgtaagactcttacttttcataaaatgtgaattcctacttttaattctaaatatcagagaccatgctttgtctttatattcatagcatttctcataaaacttggcacatagtatatattcagtaaatgttcaacgaatggatagagataatgcacacatttcattgagtatatactccttaaacagctttctacatgaaagtcatccaaagctatttgaggtaactctttttccccctcaagatcctagtccctaattaagcattatcaaatatttaaaaaaattataaatttattctttttaagaatctggcaactaatgtccctgatgaacaaaagctaagatgtccattatcatttaccacacttcttggtatgtttctcttgtgaccagagttgtgaaaaacacattagcataagagtactgtgtctttctacactataagatcataaacgacactgtttcaccaggtagcccttgacctcagctcttgctgttcatagctcctgatcgccatatgtgactccataagcactactgcccagtcttctcagttactaccttccctccctcccatcattactcacttgaaggtctcaggaaactaaaaggaaagcatcttcacaaaatatttggaatgtgtgtcataaattgccagacgattatttaaatttccacagcaaatcttggttttctagcttttgatattttaagttcccagagttgaaattcatttggagatgttatgctataaaacaaaatacgttgtagataattaggtgaatttttttttcctaacttaagattgtctgttcattctgacctgtgatatattactgtaaattaattgaaccttttttatctcattaatcactcatcagctccaactttacctgactatgaaggagttgatgcctctctcaatgaaactgccaccacaataactgtattgttgagaccagcacaagccaaaggtgctcctatcaggtaagaggagaaaactacagtagttctgccttatccacaggtatgtacatcccaagatgcccaagtatgcctaaaaccagagatgataacaaaccctatacagactgtactatgtttttttctatatatgcaaacctatgataaagtttaatttataaattaggcacagtaagagattcacaacaatcaataactaataataaaatagaacaactatgtattttaataaaaggtgattatgttctctctcaaaataccttattatactgtacttacctatttttggacgagtttgatggtgggtaattgaaacacgggtaactgaaactgagatatgagaaactaggtaggcagggttggggggtagtttttcttttactgtaagagttaaagaaaaaggagccagaaggttgcttagcagctaataaagtggttcatttcaaagatacattcattggagaatttctgtcaggagagttttatttttgtttagtttagtttggtttcctttggtttgttagtttttcatttggacaaagcctgcagatagacttgtagttaagagcaaaattctaagggcatttttgagatattcatgcactgaaccattcacctctctgtgcagtttgacttaagagcattggcctttttcccccctctagtcccatttcatttcacgtcctctcttggtatctatgttataagagctttgaagatatttgtcagaaataggatgagaaaataactcctgtccaatgcagtaaatcagttatgaataatttcatatgaatgattgaaaaataagaagctttgatgaaataaaagcagaatagttagaacacatgaagcctttttgaccttttaattcccgaattgttccttatcaagtattccagagtaaattgaatgttcagtttgccattttctttatcttttcaacagtaaagtctcatattatctaacatccccatctttcagaaaattgtgagccatgtgatttttaggaactaagtcaaattgttacaaccattttaatttctgcacatttgtaatcagatgaatatccaaaacttaaacaagtttccatttgaaacgtgattttgtggacattttgttatcaaacttctaatgagaaataaatgaaggcacagaaatccacgtaggcacttcataattggtttatatcaagtcgtttacatattcagttaaaaataaaactaatgtttgttctttgtgtaaaaggaatacatttgacttcgtgagcacgtattagccatccaaataaccaaaaataatcctagatcactggaaatgaagaaatattttttcttaatttaagaaatgtattgacaaaagaatacaaatcataaagggaactcttgagtcttgtctggctaaaaatcatgagaacactataccagagaaaaagagttggctgagggtgtacttgtaatataaacacttatgaaacactggctacttgaaaattcaaagtacgtatatagtgctgttcatgaatcaatgatctgtgagtgaatctgattgctgatccaaagtagaaagagaaaatgcctgcactcaacatcttttcctattgacaagtaatcagggtcattcacatgttcctacctgtgataaaatttactttttaggtgttcacttctgttactggtgcttaaatcagctaccagctacttgcatttatcttttaagagttagatatttgggtgaattcaactttattttacgtaagttgcaaacacagcatatttttattatttttgcatcactgtactatataatgtaacttacattaactctttattcacttaatcaattttttccacaaacattgattgatcatttattatgccagtcactgtgcaaggtattgtaaatcaaagataaaatgaccacaacaaaacacagaatctttgcccaggtttgtcatagaccatcagagatgcctgcagccttgtaaatcatttgctcatagctggtgttcaggaattttgttaactcagtatgttattgatacacgtttttaaatttaaagtcttttactttattacctttatataatttctaaagaccaattagaaacactcatctttgtatttgttggcaagatttttgaccttttctagaattgagccagaggctgagaacttcaaattatacattgttggagattagtgctcagaaaaataaatttaaatcctggaatattacaagaagaagtaatttaataataatataaacaacagattttttttgaagtgaatgttactaccaggaaaataaaatctgctttctaactgatatgctaatcccaccaagtccatctttagtttttgtaatgacttacccagttcacctacaggtgggtgccaggtggtgggaccagactggtctagtcaagtaatctggcttcagatgagccctgcctcctttaccctctgaatcctttgtgctgtctttctttcctctgaccacattcctactttcagtctccctaccagcaactgtagccttatcgtgaggcttatctgatccagtgccttaattttttgaaaatgaagattcaatttaatgtaatcatttttccttaccattgaatttatggtctggtatctcaaatctttgattggattcccatcactcacttcaaatgtacttgaagcaattttactttccactcaattttttctttgtttatgtcagtctgtcaaaatctcttctctgctaatgcttgatgctattctactctgtgacccttccccctgccacccctgtcaccttcccaaataaaccagaactacatattatccaactaaatctgagagcatccaggagttagcttgctggctgtcatagaccctaaatactgggttctgtccttccctaattatagcattactagcctctgccattttgcatttcaccatctattcatcccacctccagtggaaatatgtattctttctgcctggtcttcctaatatcaaacaaactccagttctacagtcctctgtcataccaactagaaaatcttgttatatagagttttcgtgtttagttttattaggaaagctaaaatcgccaatggattctataaatttgttgactcaataacattctatatgtgccaagagctgagctgcatacttgaaatagaaatctacttaaggcaattagtatgtgcacccgtgtgagtggtagactcctaaattaatgactggtaacaatgctgtgtgataagtgcaataataacagctagaaaatgtggtactaaagctgaatttgtgaggagaggtagaaatgagcatggccaaaggtcacaatgatgcatttacgaattgcagatagcctaggtcatggagagtgaagggtctgtgggagaattgacagcagctgaagctggagagacaaaacagggagcaaagggagaggttgtttagtgccagccccacaactgaaggtgggcacaagaaggactgtaagcagaagttaccatgggcagttttacgtttttagaaagatcactctgatagaaacatagagaatggactggggataatccagaaggctggagtagtccctgtgagaagtgctaatgggccatattaagaaagtagcaatggaaatgcaggtaagactgtggctcctacataaggttttagatcagtaggatgtgtaaagcttcatgggaagggagtttgagtggagactttaggtgagagaagatggtagcttttatatttgaagtggtagcagagcaaaaagacatctcagaattcaaggttttgttttttgaggttattaagtgataaatattttcagtattgctaccccaaatcaaaaaagtaatgctctctctatgaaaagaggagttattttatatattttgcctaccttaccaatattttcaccaagttttaatctctaagagatcatggtgttgtgcttacataagaagtaatgaccacagtgaaaaatcccattctgcataatgcagcactaagtttcaccaaccacattgtccttctgttacccattactgcttccctatgctaatgtagaacatgtgcgatgcagtgctggcaagtgtggttctttgacgaaattaatttttgattttataatcattctaaaaactgaacattgttgcctgacttaagtagaactttgaatctccttaccaactttttgagatctatccttacaactgtcatcacttgacaatcattactgtgttcaaaatgaatattgtctacatttagaatcaattccctagaatacataattccttttcttttctttctaaaaggtttcttcgtaaatgaattaaaactctaacctgggaaaatataattacaaattataatgcatagaacgtcccatttattaaaagattgacccaatatagctgtgttttcaaagaatgaaaataacagcagcatgttgtaaaaacacaaaatagtttctctgtggtgagactgtttattgtaaagttaataaatgaatatatattttatttcagcattttccaaatagaaactctacccattttgcgctgcaggaagctacccattctaaggttactttgttttgtggagaacatctaatttgcatttcataacattaagcaccacctatttagtttgataattaaaatatagtcatgaaataaagtcaaaaccaccatttcttccacagttaaattaggaaaagaaattgtctgatgttctaagttcactgatagcttaacagacaaatgtatgttagggttgcatagctttaaaatctggggctatcctcatccacctgcagaatagtctgtttcattacataaatttaaagatatcaaatagttctaattttcctaaccactatcctgacctagagcttacttgaattccaaataaaaccatcttgaaatttaactagagatggaaataatctttttgccctcttttatgggcataaaggtcatatggtccaattagatcaaatagatgttactttaattttatgtttattctctagaatcatagtaggtagaatcgttataatttttctaatcaaaaataggaggaagtatgcccttcttgttaaatcttctttctggcctctagaatcccagtccacagcttgcttatgaccttgtgagaagccctgagccagacctgtcttagcttagcaactctggaattcctgacccactgaagctgtgagataatgtttgttgctttgagctacagaatttcagggtaatatgttatgcaggaagagattatacatgtacccaagtagtataaatcttctctttcttcagatttctgcccaacggatacttttatcacataaggatttcttgaccaacccatataaaatagcactctgcattcccatcattccctctttcccttagcctgctttatctttctctagagcacttatcccttcttaatatgtgttggttttctgaatttatttttttatttgtgtctccccactagaatgtaaacttcatgagaacagagacttttgctactatcttcattattttaacctcagtacttaaaataattcatgatatgtaacagatactcaataaatatttggtgaacaaatgaactggatctaaaaatataacagccacattctgtagtaagcttatcatctgctaaaggaaagacatatacctaaaaaactatttttaacagtataatatcaaatcatatttgtaatgtaccatgttggtgcatgtaatgtgctacggccacatactgatgtatcatataagcaataaatattagacagcaatgctaggtcttttgttttttccaccctagagtttttgagaataccatttatggttctgataaatggatctttggcattataattgtcagtgggttaggaactagattaaacatgcatccctgtgattgtgacttctacccccatgtcatccttcagtcatcctcatcttaaaaattactccattgcctttagaagacagagtactgaggaatgaagatagttcaagaagccttcatggcagaagtagaaaaactagacaagaaaggcagaaattcttgactgtatgtttagtatatttgggtaacaatggtcataccagcttcgaatggaaaataaatatcaggagataaaacaagaatggagatataaggtaaggaatgtggtaatttatcaaccccagcgtaaaaagtacagagtttgactttgaatttgactgtacttcaaattttaatgttgctattatcctgggctagtgatatgtaatacatgagatattaaacactttattataaaacaggttttgtattagctgattttgccaactataagctaatgtaaatgttctgagcacatttaagttaggctaggctaagctatgctgttcagtgggttagatgtattatattcatttcaatttacaatattttcaacttgtaatgggtttattgggacataaccccatcataagttgagaaacctccatataatgtagtaaaatatgtcattttaattttttaaaaaataaggaagtcacattttgtgtattgaatgattaatgataccaatatattgatttaacctaattacagaaatatttttgaagtttattaaaaggaatggggaatatattaactatgggtagagtgattaaaaatattatgatgactttggaatagttttaattactaaagtactgagctcacctaatatttagatctagctagagtttagttccattaggtaattagacaaccagaagaatgaagaagcacaatcccatttcatgtaattagtcaactcacttctaatgcgatttcttatttcttatttcatcttttaattaatttgtattgataaataagaaaataacaaggacagaaacagatttaaaaattggaaatgtggttagagaacagcctttcagattgaacaatgaaggaaagatagtttcttttaaacatggactagtgtgactttttgttatttttatagctgtttttcactaaatgtaaatacttcttaaagactcaccatgattacaattgatttctgtgtgagttataaaaacgcctcttcaatgggcatgaaaaaaggtagaaatagatgcacaaagtgatgcatccagaaagacactgactaaagactgagcccaactaaggagagtaaaatgccactagagaattttgagggatactggtacaaggaaagatacttttcatattttcagtatcttgaaaaggtagcatgctgcggaggtccagaacagaaagacagcagtacagcagacaggtgtatatcaagattttaaactgaaacgggtatttctgggtgatgttatagaaaagtagtacaatttcagtttcgtttgggtgtaaaagcaaaagggagtatgagagatgactttaaaagactctgaagatctacttctgggtagctgtcccagtcactttaaatgcttaccatggacagtcacaggttcctaagtgaacagagttgaaaagaaagtatacattttagttttgttgtcgttttaaactgtatcaaacttgagaggggcagaaagcattctaaagatggtagaacactagaagtttcagtaaataaaagtgaatataaggtccgtgaaaggcaggtgttttttttttaacctctctatcctcagagcctgcatgatacctgttaaatatataattgttgaatgaaaatgagttaatggatacaatgtcacaggaagaaaggtaaatgagaaaattcttactcttcaaataatgctcgggatttttcaggtgaaaaatgtactttcatggagaaagaaaaagagtatcttagatatgtcctaagcaaaaatatcaacagaaaaggcaaaagcaatgtattcatttcataaacacttaaacgtccattatcctatttgaaaccacatattccagtgtggtttcaaataggataatgggcgtttaagtaagtataatatgtgaaaatgtaatggctattgtatcagcttttggagttaaacatatttgggattaaaaatatctagaaactggggtgaatgttatatcatgaagacatttctcctggtatgagtggtggtagagtgggagggttatagagtgcggtgaccaggttatctccaactagcgttccatctaatgttactcattgcacaaagaatgttttagaaagtatgcttggaagccagttctcagaagtctttttgtatttatgtgtcttagtttgctcaggctgctattacaaaatactaggtggcttaaacaagaaatatttctcacagttctggagactgggaagtccaagatccaggtgctctcggatttggttcttggtgagggcccctcttctaaacctaattattttccaaaggccccctctccaaatactatcactttgagaattagggttttaacatgaattttgggggagggggcacaaatattcagttggtaacactgtagtataaagtagagaatgaacaaagtgaggttcctggtttaagttttaaggggagctctattcttctgcctcagtttcaatagtaacagaaatgtaatacttcatttctgtaatgaccattcaaagaataaatgaataatattggtagagaaaagatatataagattaaagtgcatggcactgtaatttatatttgtatataaattatgtggaaatcattttcttaattctttatgaaacaagcatgttacttgtattttagaacttataaaattgaaataatttatctttcattttaattgagagtagggccaaatctgaaagttcaacccaaggcattgatttttattttctatgggaccatacttaaggctctttcccaaagagcctattgcaccttttcttcctttactcttctccaacactggcaatttactttgctcctcacagatctagatagacaagctgtcttgcatgaagtatccttaatttgtaatgtagaatctctgtcaatgtaatagaattagttaagattgaatgttcactagattttgtgtttttttttctagaggtatgggataattaatgaagaatctatttttaaggattagattaatgattaacaaggataggtaattattattattctttagggcaagaatataaggttacatttgtttggagagcatgtatgagggagtttatatgcatatgtggatgtatccacaggacatgcaaatgtataatatacaaatatgaattataaatttaaaataaaacatagcatatgtcagctatgatcattctcgtctttctccagggctatgcgtatgtattttctatatcttaaaattgacaaatgcctgctccatggatgcctcagagaccatgcatcttgtcagtagcattcttagaagcttagcaaccaacttggcagaggtatagggaatgatgcagcacatataatttgaaataacatagacttctgccttgcttgctcaaatcacaatttctaacattaatacaagttctgttatctttttagaggaaacaagatggatatgaacctactgatttattagcaatattttaatggaaaatgggagcttaaataactaggaagaaaagaaaatctgtaatttatcaattaaattatgatttaactctttcttttgatgtccttttgtttaatctatgaagatcttttatttgtaggcataagagtttatattaaattagaattttatgccagagtctaaactgttttaattttcatagatgcatgttcagtgtatctctctctctcctctctctctctgtctctctttctccctccccctctcctccccactcccctctacctacccacctctttctttttcatggaagtcttttaaagaatgtattctgttcctcctggagatccattgaatatcaatatgcagccctgcatacaatttatgttcaacttacctaagataccacatatatttttccagaatttttaggaattttaaaacattttaaaatatatttataatgtataaaatatattataataataatgtcaactttcatggtaatattttacctgaaaaaattttaacgtaaagaattttctactaaaaaagaatattgttaatataccagcttcagagttgttaaaaaatattgttagatatccgggggatctttattttaaatttgccttgtttttctttttgtttttttctctcctttgtaaagtaattgcaattatagaaaagttttaagacttaaagatatcagaaggtttaggttagagctttaataggccaaatgccatctgtttctacaatttgtaacattttattattaacaactccagaagaaggaggcggtctatttcggttgtgaggacagatttctgtccatctgtgcccgtattgccgcatgtcacttgtattttagatctacatagctctgagccagtgtagatgccatggcaaggtcaagaggtggagaagcctgtcagtacattctgtctctgaggctgtgacaaccacaaatgggtgcttctagcaccgccctgaggcagtcattctgttagaccttggagctggactttctgtaatatcatttcaagggaaaatgttaactttaaacatttaaaaatatcagacaaagaactgaatctatgatgtgtctttggttaatgtcagaatccttattagggtggctcattcctcaacatttaaaaatgttgaaagtcctacggtgattgttcttctttttatcagtttctttgtaactacagtgatgttagggacagcagcatctatatggatttttcattttattgcgaaatagctgaaaagagtataccaggttaagactaactttaaatactttgaaatgtggtgtgttaatagtcaaccccttaaaaaaaatcttagtatcttaaatctctaaatatgtgtgtatatatatgtgtgttctttttttcttttccccaaagtgcttatcagattgttgtggaagaactgcacccacaccgaaccaagagagaagccggagccatggaatgctaccaggttcctgtcacataccaaaatgccatgagtgggggtgcaccgtattactttgctgcagaactccccccgggaaacctacctgagcctgccccgttcactgtgggtgacaatcggacctaccaaggcttttggaaccctcctttggctccgcgcaaaggatacaacatctatttccaggcgatgagcagtgtggagaaggtgagcttcctccaggatttgctttttccctgctttgaagaaaagctgaagtcaaattttatgaatactcagtagcatccgtcaagaaaaaaaaaaagaaaaagaaaatttgcatgtagggggttctgttctcaacagtgtgcgcagttttggggctacagtagggctgaggccgcacgccagttccatttcacagggttcctgtttcctagtaactgcttctactcgagccttcctcaggaaagcccacaatagcaattgagagtaaaatgatttgaaaacgtgggtgtgctgctgctgggactccaccctcagtaacgatcaggcattgttctgtcttccttgctcagtggtggcacacttcaagagattaaatttactgcaggataaacagaatgcgtgttccacagcaggctaataaaaccttataaacttttcagggttttcaagccaaatagtaaataacatgtaacaatcctctgattacaaagtaatagggcgcctgtggtatatctgactgaacctaaacaaaaggcagcctggcgatgactggctgctgagccattacagaaggctgctctctgtttccctggttgcccctccttttcccattttggacacagttgtttttgaacactgctgctgatcccaaatgaatattgaagaggaaaacacaacaggacattagaaacgaccggcagttccgtatgtgagaaaacaacctggcctttcatgcctcatgctgttctctttggaagattttctttcctaaaacttatttttatttatttatttatttatttatttatttatttattggcagacagagatagagggaagacaaatgttgaggatagaaattttcacaatttaaaatccaatagaatgatgacattttaatagacttgaagccgtataggaaattgctgggtttatgtaattgagtccctaaggtgagcacctgggagtgatacatgatatacaattacatcagtcatattatatcttaaagagtttaattggaagacataacaatccttttgcatttctgcaggggccgtgagagctttgggtattgattggctgcttttgaatcaaagctttgttgtttgcttgcctgtatgcttggcttgtaggtagcaaagaaaaaggccacagcatcttctaagatgtgctccagagtcagaggctgctcatggttgaagatgctcttctcgtttacctttaaagaactgaggtctttagagagtagtccagtgtccactttctgcctacatatcattccataccactgttacaactgggctactataaaaacagaacactatggaagttattagtccattctgggtataatatagcattgagtaggaagcatagttttgtgtgagggttttgatctttagagaggttccaaattaactttggttatttggtctattataccagaggagtgttaatgaatgtctgttacttataaaggattttctctgcattctttaaagctttttgatatgaattttctcttccaattgttaatatatctgcactgtggtttaatcaaagtacagaatagcaacaatatatttcacagttatcttggcaaagagttttaaagttgatgtgacttctacaagtagagattggtaatgccattagaaagttaaacagcaattgcttttaagaaatgaaaatcctttggggcctttatgggaatgtgaaataatctcttgcaggttaccatgaaggtctcaggccacaagtaatagaagtgcaacattttatttttaattactaattcccccctcactgctttattttaatttaaaaataaaaaaataaaaaatgcttaagtggaaattgtaaactcttttataaattatcaacatatagaactactcaagatagagttataaatgcatcttgcaaacagatcgcctctggtttgttcactggctttgataccttttctcacctcttgtgtattcagggatgtacgctgactcaattaagtcctagaggaggaagagtggggccaaaagtagctggcagggacatgtgtctcctactgccacctgacagcgttaaaaataatcatattttttcttgtcctttcctactgcttctactttgtatacccgctctgtctagcaagaggaggaaaattatgtatgctgagaaacatttaactcctaatagctaaattaaaagaaagaaagaacagataaattacaccataactatgatgtaatgttttgatgatctttctaactgctatcatttagctttttagtcatgctaggatccagatgaaagtatgtaatgttcagctttggtctcagtctacagttctcagatgaaaattaaatttatatttggaactgtttttattagctttgcaagtacatttttctgatagtttacgaagcactatacatgaaaatagaatgctatactacttgtcacaaactaacctgtttcattgcaaggtaaaaacaaatatttacatctctataaaaactaaaatatttttcaaagttcttactttagatttttaagtatccctaggggggcatattttttaaagttttcttaatattaaaattctgttgtttataatccctttttatgaccccagatggatcttcataataattatagtttacgaaacaggaaacattatctgtacattgactcttttttttttcatttttactctatcaggaaactaaaacccagtgcgtacgcattgctacaaaaggtaagaggtttgctttttttgcttgttttaactactctcaccccctttctaaaatggaaggactttgttccctgcttcagggctaaatatgacatttctgttatagttagttctgtgactcatgtgggtgtctttaacaactaatggggtgctacttcccatcctctagtacttgactgaaggaatcttgttatgataacaggaaagatctagaaaaccttagaagggcttatttctgccatttagtgtctgaaaaatcttgtgctgctgatcaaccaatatcttaggaaagcgtcagcaatagcagatgaaaatagcaagttgcttgtttaaaaacctctattactttccattgtagacaatcaaacataaaaagaaccaagctaattcatgtttacataagattatagggatagagattagtccatatcttcatcagtagtgcagttagcttgaagatcatttactttttttaaaacttattctgagaaaccagatctgtgatggctagctcataaccagggcaattcctgctgacctggcatattatggcttagctgcctagtttctttgacaagagaaaacatttgcatctttgaatgagtatttagagttccaagtgggggaaagtctcctacattctctgtgtttttaattcttcatttaagagttacttgattgtgccaacaaagaataaattgctacttggtgtattctagcaagagaaacatgaaaaagctgtctgcatgcagacgtgggcctcctcaaagggttggttcttggggtggtttgctgccggaattagtagcagacccacatttgtgtccagtagttgattcatttggggtaaaaatgaatggccatattctgtttgtactggcatctttcctttcatcagttttctccatctaatcatcagtctgctcaatcagcatttgtgctttactcctgatttgtaaggcaataaagaaagactttctctttgacgcttgtgaataataaagaagctttatggaagagaaaaaaatatactttttcaattcacttatgaagattccttttggtagtttttatttaaaaaagcaattcttaaagagaaaatatacacagatacatacgatgtataaggattttattttaaaaatttagcttactgatcaggaacgagagttgaaatttttaaaagataatagaagaaagcatttaggtctatatcacctgtgtttttccagatttaaagtagaaccaaaattgtaaaagtgtcccacattgacctctgaagttctttagatatgtcatgctatgtttctgtaactgagaaatggtagctatatattaccctaacataacttttttattcagttatttcattatttgctcttgcctgagatgtttgtgtccttttatcgctctctcgatacaaatttaaaaaaatgacaaatatcacatgatatttaaactataggaggattgagatcctggaaacagtcttaccatgtggcatagaataattgacagaaactttgaagtggtaaaaaatagtccattatttgtctaataatccagctctgctacacttctggatctcaggaatgcagtgtggtgtggtgtagtgagtaagagaaaggactctggccttacactatctgagttcaaatattgactgtgtcccttaggaattttttagtattgagaaacttatgtaaaccctcattccaaaaattaaataatagagtacctacaccttcttattgttgtgaggattaaaataacatatataggccagacacggtggctcctggcactttgcaacgccaaagtgggaggatagcttgaggccaagagtttgatatcagcttgggcaaaatagcaagaccctgtttctactgaaaatttaaaaaaaaaaaaaatgttagccaggcttgatggagctcacctgtggtcccaggtacttgggaggctgaagcgagagcatcgcttaagcccagaagttccagtttacgttgagctatgatcgtgccactgtactcctgggtgacagagtgagaccctgtctctaaaataataaaataaaatatatatgaagtgcttaaatagtgcttaacatattataaacagtacatgtgttaactatcttatcattatgctaataattttgtacttaagagggacataacttatgttagacagttatgaatgaaatatgtataaaaacaaatctaaattttcgtgatcgagattgctaggacaggggagaaactaagggttttttgttcgcttgttttttaatgtttctgccctggtctaatatattttcttctctgaacctttagcattttttccacatatgaaaagctaaccctgtttctacaaaaactaaaaaaaatgagccaggcatggtgacttgtgcctgtagctccagctacttggaagatgggaagattgcttcagcctaggaatttgaggctgcagtgagctatgattgtaccactgcactccagcctgggtgacagagtgagactatgtctcaaaaggaaaaaaaaaagaaaagaaaagaaatgaaaaagaaaaactaccacatttgttaaagtaacatcaacttattgcctgactacattttaaactaacatgcaagtatggtcagctttggtgtgaaatttttcaatatgaaaataaaaagttttctgacagggcgttttgaagaaacatttaatagtcaaaatggcataatcatatgactgggaagaggcatgaaggaaccttctggtgaaggagtggttcagtatttcacaggtgcatatgtaggtaaaaatctgtccaactgtacatttaaaatgtgtgcactttactcttataaatttgtgtgtggatatataggtagataggtaaagtatttcccaatataaaaaaatgaattatacattaaaaattgcatggccagagttagaaacagcactgagaatattatagaggagtctctggagtttgaaaggctcaccttgctagcttcagtgaaggtttccttctatcagacgaggtgcatcttcagtacataagccactttcagtgagaaggacaaccctgcccaggaatccctgggctgaatgaaaagggtctagaaaggacctttcttggtcctggatgactcctatgggcaagtcttgtgtttcagctgccctacagtcagaccctcccctgcctcccaacccccaccccctttccagtgtcagttgtgagtactgaagagctagaaccttgctagaaccttgctttcctaatatcctttgtatttagatcaattttgctgaaaagaacttagttctctggaaaatctggtgtccctccataagacattccagtttgcagtgtgtccttttaccacacaaattttctgttcaggccatatgcaacagtctgttgctttttttctcatttttttgaaaacttaaaacattccaaatgtagtctgggacaaagtaccttgaacaaagtgtgtgtttctctcactcactctctctctggaaattattttcacatcccctttattttagaaaaagttgtattttgtatggagaagccagagttcattgttacatgttagtatcatatttataatagaaaataaaacattttactaaaacaaaaaaaaattatttagccaaatttgaagctctgatttaatagtcttatacatcactatatgccagggacaaatacagagtgagagtcatattagatacaataaatatttgttgagttggtaattgaatttgaacaaaacgtaaggtagatgcttctgctttcacgtttaatcaaacaggttacagtactgtctgcaattatgaaaagtatcagagcaatatgtgagttaagacaaatttattaaataactagagttgtttttatttctttaactgtgcatttatattgtgatatatatttcatattctaatatagaatacttttgccaaagctaagactttattttagtaacaaagcagtcagttaaaaatataatctataaactaatgtgaattaaattaaatttaatcctagtctgtgtctatatcagttttattcaaatgagttttcttcagctgaattctgtgataggaagacagtttagctcaaattgtcttttcattgtaatcactgctattcttatgaccatattctatagcttctttgctttcctggtactcacatttcaatgtgaaggacctattcaaatgaattaaccagaatgaatgagttgatatattagagcacagagtccaaagagaatctagctattattacttcttataataagtcttaaattcgggatacaggacattataatgagagattaaaattctatcaagtgtcttaaggatggacataactaagtagcataagaatgtaccatgttttgctaatgagaaactctgacttcattggtggatgtctttaaattttacagtcaaagtagaaataatagctctgaatatttttatagttctcaagcataagatcagaactagaaattaaaaaggagtaacacatacaattttcaacattcatcttttcccagcattttgaattattcttaaagttggcgacagttcaccattactactgtatatctggaataccctgtgtctaactgatttcatcttaattcacttcacattggaccccggaacctctctctctgctctcattgctagtataagtagactcttctccaccatgttcctagagaaatagccaagtcaccgaaacagaaaagatatgagttgaggaccttcaagggtgcatgatcactgttttcatcccaaccccaagttagatggaagttaaatatttctttgctttaaaagttacaaactattattgtttgcatatggagtattactagtctaataatttttgacagaatgataactgggatgctaggatatagagagaaatggaaaaaaatagaacggacctgaagatgattcaagcattttgcttttatggaaattaaactgttttatgagaagatttctgacctattaccctctctttcctgaggagcctgttgcaggtaccttacatttatggccacgtctacgggagagaagtgatgacattcattcataaactgatcaaactgtcagtgttaactgtggaaaggatagagtttctaacctaatttgtaatgctgtaatcacatacttagaagagactggaaaaacataaattggtacaacctaagggaactaacttataatccatttcagcaaaaaattcaaaaggtaggtggttatatcatcaatattcaaaaatcaatagtgtagcagcaacaaaacagtattttaagatgttgtcatttataatgtatctctaaaaattagtgtaggaatatatctggtgaaagatagattacatctctacactgaacactacaaaatcttattgagagaaattaaacaatacctaaattaatgggatggcacaccatgttcatggattagaagattcaatattggtgaaatgtcagtgctcctacattaatgtgtagatttaaagcaatcaaaatcccaattttgttaaaaaaattaacaatctgattctaaagacaaaatggaaatgcaaaagaataagaatatgcaaggctactcttaaaatacagttcctggatgttatcaaggccaatataaagttagagtaattaagacagtgtggtaatagcacaagaataaaaattatgaccagtgaaagagaaactccagtaatagatgcacacacacgttcaccattttttatgacaaaggtaaaactgtagggaagaggggaaaaggtacccttttcaataaatgacagtttttccatatctatatggaagacattatatcttgacccctaactcacactatataaaaaaatacagctacatataagagttataacagtatagtttttagaagaatatagaacatattttatgatgttacaatagtcaaagattgactccaccatcctccaccagaaaaaaaaaatttaaacaattttttaaaaaaataataggcaaggattttttagacaggagatagaaatatgctaaacaaaaaggaataaatgataaattctacttaagacctctttcctgtcaaaagatgccattatgagagtaaaatagaatttacagaggagaaaagatacttgtaataaatatatctgaaataaggcatatcaaaaacatatttaaaaactattaaaactagtgaggagacaagagacaatccattagaaaatggagaaaacacttgagcacttaagagagaaggaaatacaaaatgatcaattaacctatgaaatggtgctcaacaggaaaatacaaattgaaaccacaatgtgattccactacacctataccaaaattagtaaaatgaaaaagtgtagaaaataccaagtcttaagaaggatgtaaaataactggaaatctcctaccatcctgctggtgggggtataaatttgcacaaccactttggaaaactgtctagcaacatggactgaaagtaaacccatgtcccaacaattccattcctgggatactcaccaaagaaatatgtatgttaatacacccaaaaacatgtagtacaaaatttatagcagcactgtttataaaagcaacaaactggaaataacccagcaacaaccagtagtagattggataagtaagttgggcatattcacataatgccatgctctaaagcaaagaatgcaaactatgactacacaaaataatatacataagtataaccaacattatttgagtaaaagccagacaacaaagaatatacactttattgtttaatttgtaaaaaagagataaaataactaataaaagttaaaaggtatgcagtacctatatagatgtattatgatttaaatattatattatctagatatgtatctgtctcaggggttcccgagactaccctcagattcggtgattcacaaggaggactcagtcatcctgtgagttgtcctgttctcatggctacgacttattacagtgaaaggatacaaagcagaataaggacagggagaagtcacatggacaaagttcagaggaagccaggtgcaagcttccaagagcctcttcctatggaatcacacaggacatgcttaatttctccaggatggaattgggacagcacatgtgaaatgctgtctatcaagaaagcttattagagactcagttcctaaggtttttagtgggaactggtcacatggaccccttcttgctatcatctgccaagattcccttctcccagaaggaaactagacttttagcataaagcacattatttgcacaatttaggcacaatgaaccactcttctcagggaatgatgggaaacctcccaaatccgagttcccggacatcagtccaaggtcaactttgcaagccgccctttccaagaatttcagtcttagtcctgctacgttaactcttttctgtacaatatctatatcaagtgtctcaagggctagttaaaagaatatttgaagaaattagagaaaattccaaaaattatacatacaattaaggaagtagaaaattggatgtagaaaaataattagaaaattaatcattattgacactaagagagaaatctgagggataatttaaggacttcctttagataatgagttatgacataagataaagtcacccatagcctgtatctcccccaaatccttccctaagtagagaatatgggcctactttatttgaaacacttctgaaaagtatttcttgaaaacactctttagaaccttctaagaaatgacagctcatttagtcatttgccattcagattgtataccagcttatataataccttgattcattaattatttgctgaacaatcctaaaaattatgtttatccattacccattcatacttttactatctttctacacccaatatgtatgcagttcaggttttcaaactcttacttgagtaaaaagggagaacaggtatttaaaagcatatttctagccaggcgccgtggctcacacctgtaatcccagcactttgggaggccgaggcaggtgtatcacaaggtcaggacttcgagaccagcctggccaacatagtgaaaccccatctctactaaaaatacaaaaaattagctgggtgtggtggcgggcacctgtaatcccagctacttgggaggctgagacaggagaagagcttgaacccgggaggcggaggttgcagtgggccaagatcacaccactgcactccagcccgggagatagtgagagactccatctcaaaaaaaaaaaaagaaaagcatatttcaggtatgttcaggtatggataaagaaaacaacagaaagattaaggaataaaaatacatgatgacgtgaggtctttgaattgtggtggtaagtagatatagcattgaacagaagtttaagtaagtatagaaatctgaccttaggccccttaaaaacctgaccttaggcccttctcattgactacttcttaaccgttagctatgtgctgaataaaagctggaaaaccagagaaattaaagaggaaagagggaggggaaaacaaagtggaagcttcacagaggcatccacaggtcattccaaaaccatagtattatgctcactattagcaacaatctaaatgaagaaaaggagaagaaaggaaaagaaaggccacattgccggggcttacacaagtctaattccaagatttaaaaaaaaaaaaaaaaagaaaagaaaaagaaaaaaaagcgcttatgttctgaataatggacacttctggtaagggagccagaaaaaatttaaagacactttaagcatggccagacatggtggctcatgcctgtaatcctagtgctttgggaagccaaggcaagagatcccttcaagccaggagtttgagatcaacctgtgcaacacagtgagacccaatctctacaaaataacttttaaaattagctgggcatggtggcacacacttatagtcacaattacttgggaggctgaagcagggtgatcatttgagcccaggagttcgaggcagcagtaagccatgatcactccactgcgctccagcttgggcaacagagcaagaccctgtctgtaaaacaaaacaaaacaaaacaaaaaacaataagcaatggaggaaatgtttaggcaataatcatggcgaatacaaagacattaagaaaatgaagaggagatagaaaaaaaatgtataaatgaaaaaggacactgctaaggaatttagtaaccccaaattcatgaatggttataatccaatagaaaaaatatatccaactctacaccattacttaggtcttaagcatatttaaattataaatatcaaaacaagtatcacagggccagttcatttatatacattggttgtagatcattttcaggttaaactacccctttttaatttttgctattattttagtatgtttttcttattctttgagtcctttagaaagtgctttgagggctgtttactggaaaaagtgaattcaaattgctctttgtcaaaataaactttgtaacttttcagttttctaaagataatgatcaaatttgactttttaatgaaatagtttcttaaaattgaaagtgccaaaaaactttcaaatatatggaaagagaaagatggatgtgataggatttttttaactctcttatgtttaaagttatttatttctttattaaatcaaacaactcaggggtttaatttggatagaaataaaagtcatacagtcaccaccacagccttttagaaacatggaatcctaggatcagggaagttaagggtctatttaaagtgtcatttcatatcctcatgacctgtggcaaagcaggattataagctggtcctcctgacccctagtccgtggttcattcttctctgtgctaagtgttctccatggtcaaggctctctgagggtagggatatgaaattaaacatgaatgaatctgtcttcaaggagtttgtattcttttaagtaatatgtgaaacttaagtaaagtatgatacaaatgtgctatgttcaaaggaaaaaagacaaagtggctggaaaagtgtagtgagcaatgcttgtgtcccactgcaaatagcattagccttggattcagactagattctagattcaaatcccccctctgctatttattggctattaggatttgaacaagtcatctgaactctctgtgctgatgttttcttactgtatataaaatggaattggagttgaaaattattaattttcagaactaacaaaagagcagaaataatagatgtgaaatttctagtaaagtacatgtgagacatttttaatacatacttataattcattgctattattactattactcataattgcttatggtggagaagctaagagaagaattttatggaggaagtaacattaaatcttactttccaagatggacattattttgacagttggaaatgaaagggaagatgatccaattagaagtaattaggtagaacaaaagctataggactggaaaacatgctttacatctaaagaataaaagttttctgtctcattcatatcaatgcagggaaataaaagctggaaagtttatgttggtattggacagcatcttgaattcaaactgcattgtaaaggcaacagcaaatcactgaaagtttttgaagtgaaagcaagttaatcccagctatatgtaacattttgggttaaaaaaaatctcaatagcatatatgttagattgatgcagttaaatagtagaggtgaagaaacaagctgaaagcctggtgtagctcttttttctcagccttttctcttttcttccctttttttccttaaaaattcatctcacaaccattggggtggggcagagcatggtaggacccacaccagtgagagatgaaagcagcagcagtggtcccacagaccttgtcagagcctgagtcggatggaggaggcagtctcacagagtatcagcctcgtgtggcatttcagaagtcagttagattcagaagcttgtcttcatggggacggtgggtggcacaaccccatgtgggaagtcagagcttgagcagggagtagagtgtccacatgtggaggtgaactgttggggttttggagcccaactagggtgagtagaacatcaacacagtaggcaatccaccttgggaaatcagagcccaagtgtggtgaaaaggggacttgtcagggacgcatagcatggtgtgaggtatcagaatccaaacaagatgaagagcttgggggtggggagtcagactctgagggaggttaagagggtgtccacgcaagagggtggcccatacagcatgtcagagccttatcagtctaggtgtgtgaacttccaggcagaggttgatcatgtgccggttgcctgagtctgcatggagtgaggagcacagccgcacagggaaggaggtgacagcagagatggcagagattacgtgtgtggcagggtgtgggggtgcagggagaaagttaaaaaacacaggtgaaactgtgtgtataggggtgtgtgtgtgtgtgtgtgtgtgtgtgtgtgttccatacacatagtccactgagacagcctgggagcaacaacatactgatggaaaatatgcctaatatccagatgttggtgtctaaataccattatccaataaaagtacctggggctctttggataaatggctcattccagggctggaacaaggaaagtacaacatgaaactagattattattattatttgccagaaagcgctaaaaaaataatgagggcatagcaagaggacacaattgccaacctcaagggggcccctcattggctgaactagaggcctattacttgagaatcaaaataaagatggtgattgattataacactgaataaaataggaaagcacaagtccttactgatataaatagagaaagatggatgagaaaccaggtatttacatagtttcaaagtagctcccaaaaacttaataattataaaagggtacagattaacctcacattggaagagcctagcagatgctttgaccaaatgatgaaggtgaacagtatccatgttgggaaagacattatggtttcccactaggatgcaagaaaagcacagcatcacttttgtgatattccaaccaaagatgtatatccttaatctaaacatttaaaatatcagacaaatccaaattgaggatattctacaacataactgagctataattttcaaaaacgtaaggccttgaaagtgaagggaaggctggactgcgcaggctgaaggggaccaaagagatatagcaactaaatataactaattagatcatttagatacaaagaacatcattaggacaattgggaattttgaatgggatctgaagtttagacagtagttaattttcttaagtttgaacgtcattttgtgatctataggaaaatgtccttgtttatgggaaatactaaagtattctggataatggaggcatcagggcagtcacttactcttcatgcttagtaaagtgaaaacaagggagtagtgtatttgcaaattttctgtaactttgtgtgtttttccaacatataagtgaattttaaagctgttatactaaaatatggggagcagatgagtgattacattaaagaataagaaataaggatatggaggatatgatggtggagtacaagttaacatgtcttggtgtgtatctgctgtgaacaaggaagctgaagacttaaatatgatgctgaacttctgtcctgagccaaccacactaggaagatgtgatgtcagtcacagagacagaaaacactagaaacaaaggctgagattaaaaaaaaaatgatttattccattttggaaaagccaagtgtagggtaccaaaaaatagctaacataaatgtaattggaaaaactagaaataaaagtgtggagaatgtctggaactagagaacttagaacttgggagtggtaaaaacatatgaacaagataatatagaaagatgaggagagctccttgcaggatacccatcttgagacagtaggaggaagaaagtgaggtaggagagaagctagaatagaagcaaccggatcgaaagatgcataaccagtggagtgccttgtcacaacactgacgaaaggaagatataccaagaaggggcttataaacgatagttaatattttaagcagcatggaaagctcaaataaaataggatgagaagaggcaactgggtttgcaaactgggatgtctatggttgagtttagaaaagggagcattcaattagagtgactgggcaaaaagatagcgaatagaagcaagactttagcatgaactggagctgagaaaataaagtggttggggagactttcttttccagaaatacattactgataaaaaggagattgctaggactttaatttaggaaagaattattaagcatggtagagactggagcatattttatttatcagaggaaacctaccaatggagcaaaaaatattgaatatatataagaaagaatacatttctagaggaagtaggcagtgatataattgaacaaatgcagaaacatatcttttaaaacaatagggaataattgaacctgtgagggcaaatggacaagtgacaccaacagaaaaaattgagaagtgtattagattatccatttaaacaaattaaatgaagtcctgtgcagagagtacaagtatcagatgtggaacaagagaccaggaaatttttaaaagtttgaaaattcttgaagaacaatgtgaaagaatttaaatctaagaacaattagcatacatactgaaataacatcattttgaaaatttttcagcgtgtaaaaatcattctaaaaaattcctagtatcggctgtatgccatgactcgtgcctgtaatcccaacactttgggaggcagaggaaggaggattgcttgagcccaggagttcaagatcagcctgggcaatataacaagacctatttctataaaaacttaaactaaaaattaaaaatgcttagtgtaatagtttgtttcctgccttgtatctctggtggcagccagcacataaagagaataaagaccttggcttgactattaaacatatgaattaaataatcagcatcataatgtttaaaataaatagtcatgtggttacatattatgatgcaagagaagagatatcctgggagttatgttcattgcagttgagacaaataaagtcactgagaagatatgcttcaagaatggagtggaagagtttatctcaattgtactagaaatcaagaaaggctttccatttataaaatagcctattcaaaaccagaattgttctaaaatatgaaacggaatttggttagctgtatatttgaaagcaaaaaggagaatacgtctcaaggaaggtgtctgtgatacattaagaacatggagcaacactagagagtcacttgtacaatgagacaggatcattgtgcaacttgcatgctcactgtctttaggttcagttctctctactgaaaaaatactgtttgagattgtttgatattgatttgctctatctatttttttttttcttgaggcggaatttcactgttgttgcccaggctggagttcaatggcgtgatctccgctcaccacaacctccacctcctgggttcaagcaattctcctgcctcggcctctgaagtagctgggattacaggcatgcgccaccatgccctgctaattttgtatttttagtagagatggcgtttctccaggttggtcaggctggtcttgaactcccgacctcaggtgctccacccgctttggcctcccaaagtgctgggattacaggcgtgagccaccgcacctggcctatctttgtatatgtaatttataaagtgccctaattcattataccctcatgcacgcacacaagtatttgtaaattagcagctaagaattttgtgccatgatgccatcaagaatttatactgcgattatttgtttcttaaggaaactatcgtaacaagtaacatttttatggttagatttaaatgtgctgaatcatgcaaatatataaattatattaaaatttacttaaagaatctttaaaagtatttcactagaaatatgctttatccatattaaactaacaaaagaggcatttcaattgaatttttattttatattatttaataatatttagcatattatgtcatttaaaattttctcaatatgtaaatagttatttgtggaaccatgtacttgtttacataaaattattcttaaagtaaagcaagcgggcattgataagaaatcaagatgctgaataatccttagactaaaactaagaaacaaaaccaatggtatgggaaattgcaagtattgtaatctgtttatgtaagtagtttatattttgaaactactttggttgtatctaattttcccatcctgtgaacttctggattttttagaacaaaccttgttacttagcatttagttttggcagaagtttgtatgttagtcaaatctatttcttaaaaaacctgacatttccatagataaaagctatgaaatctgatagaatggaaaaatttctaatataggtaaatttatttgaacatagtatttatggtgaaagaggttttttttaatttaataatgtttcttgtctattcatgagccattttttgatttctgatttcatttggatatcaatatttctatagcaaatatttattttatgtccatagtataccagacagtgttgtaggccctggggatagaaaagtgaatagagtaaagcctttgcttttatggaacttaaattctagttgaaggaaatagaccaaacacaaacaaataagtacagtcattccttagtatccaaggaggactggtcccgggaccccgaggataccaaaatcagttatgctcaagtccctgatatgaaaaggcatagtgtttgcctgtaacctatgtacatccttctgtatacttaatctctagattacttataataccaaatacagtgtaagtctgtggttgtttgactcttcggatgcagaacccatgaatgcagagggctgactgtatgtggcatggcaaatggtgataaatcctttgaagaaaaataaagggtctggggataggaaatactggaagaatgtgtctagggcattactactttatatacagttatcagagaaagtctcgctggtgaggtaatgtttcagcagaaacctgaagggaatgagggcatcacccatgtagggcaggagcattagaggcaaagggaacatatgcggaaccttgaggagaatttttccttatctgctcagagaaggtgggtcaaatccaggggatgagctagaatgttctaaatcagctcttctcaaagttaagcttaagtcagaatcacttgggggcttgttaagcagattgctgggcctcaactccacagtttctaaatcactgggcctggaaagaggcccaagaatttgcatttctaatgagtttacccctgacactgctggtcaggtcaacaactggtctaagcaagtcccattcaccctctgccagtgattggtttagcgtcgtagatgtaatcctatcttggcatgagagatctaaggctacatcttcttagaacgtaggacttcaaagaaatgttttccttcctgatttataaacagagaggtgggaaggacaacccccaactcatcccttttacctaggggcattgttttatcaggatatggtgttcagaaagttgagccatattgtctaaacaaattagccaactcagagccctaacaaccatgaggttctcagatatccattgctggacttccttaattttagatatctgtatttgaaaaaaaaaaagtcattatggaaatcactactagtaggtaatctgttatttgcagcatatagtgtttgaactgatattaagtttttattttcccttaggaattttagtaaaaatagtggctagtttccaatatgtagtgtaaaggttcaggtatttcacaaatgattgcaagaaagcacttaaagttcatgtaacctaatcattaccatgatatttttaaaatagtgaatctctttcttggtgtcagtctaaaataccagaaaacactttgactgccttgccataggtactttggtggaacttatcttcactggcaccagatatagctggaaatcagtaacagacagtatccctagaagccatggaaagaaaaaaattccaaaagctaaggtatacatgtgggcattcatttttcatttgtttgataaacctaaagttgatgtataattactaaagattcatatagtctggagtttacctcttcattttgtatgtttatatcctgggaatgtctaagtcagattattatttactcagaatattacttatggtaagcaatgatgatataagtccttcctcactccctctaaaaatctttgacttcagtgctagcttgcactttaaacatgtattccaatattaagaaacaatcacttgttacaaaagagtagaagtacatgcaagattttatccaaaatccaaatacataagacataccagcactgatcatgttttgtctaatttctccattcttctttcttttgtggtctattcactaattacttgatgaagaatttgtttttttaaaagcattttcttcataatcttaattttgtctgatgctgcctttgtcaaatctttcattggtgcccttttctctgtgcagatggatgaaatgcttttgtaagtgacagacattcaaaaataacaaacatgagaagaaaaagaacagtttatctgtcaagaagttacagtaaaactgtggaagctccatttggttgtactccatgcgtttagaaactttttgactgaattcatttccattagagtcaccactggtgaacttgaacaactccacaatctccactcttaaattgcactcttgtgtttcatccctcacagaatttacaaaagtggagggtggtttaaaagcaagggtttaaaaaaatctatatttaaatgggcttcagggcctgaaatcctagtcttaatttcttaaattgtactaagatgttttatttttagtctgctgcacgttgaaggaaataggaaaacattagcaataaattttcagatacttttttaccacttttttttaaagggatggaagttaggatcaactgtggtagattcgcctagccattcagaaactttgggcagggatgtggcttttcttggtccctaggatggaattagcctggggaaagctgctagcccttctgaaaacttgtaatcagtgagcagaattttgtagtttttcctctgagtgcctgagcactcttgctgataatcacactcttttctcctgcaagggagcaagtgtgtatcattcttcctgcctgttggatctatgcacaagttgtcaaaaattaatctgatttaaggtttttcttttcctgaactcagaagggaggaaattacagaaaagtatattagtaatagagtaatagactatagcctgagggaaatgaaagcatatctaagcgaagccaagccaggaacaagtacaattttaatgaaaaatcaatgtttcatgacttagaactgacttttgttaggcactaatatttcctgcttttctgtcaacatccttatcattataaattcttttttgtttcaatataaaggtactaaaaaattaacagctaatagattattttcaacctgtttgcaaggctaaagtctctctttgcctttgaaaaactggagtagaataaaaatgttatattaccacaatggatttaaaggctaacgagtggtcaaattgttaattattcagaaatttcttattgaaatgaagaactgtctggatggactggactgtaaagttcatgagggtatgggtatcaacctccttataattgtgtgtgcctgatatttaaaagatatgtattaatctctttggaatggctgaattaattaatattgttattcagaatattatttagtacaataattcataattattcttttcaatgccctgaagatgtatcagtgttttttcctgccatattttaattttattgacataatttagaaacaatgtggagtggtcatttttcttttaatctaatacagaaaaagataaaatgtttatgaatagaagttctgcctttgcttttgctcctgtccccacataccctcttagaatggacaaaatacaggaagaaaacttttacctgagttcttaattttattacatcttacattaattttcacctttttgtgagaaaaataggtttaaaaagtagttgattttttaaccttgcctccacctactagatggagagtattgtcattactgtaaatagaggaaagaaatgatatagaagcccatgacttcaagaagtttatggtccaactcatgacacataaacagatctgaaaaaagtaaagtctaggtaaaatacctcaaaaatgtgtgtgtgtaatataagtatgtatactatacgtaagtattctactaaagagataggaagttttcaagaacagcgatgatgacttgtggaaaatttctgagaagtcattaattctcatctacatcttaagaagtcagctgaactttcaactgggactgggtgtaagcagaggcagaaaagttgtaacagacaggctatatgaggattttccccaacaaatttattcatttattcaacaaaaaattttaaacactccctgtgtaccaggcatgattctagatgacagcattaaaatggtaaacaagacatatcacttcaaggagcttatatttcagatggggaaaccaactatatgtatactatatatatatacacacacacatatatacaaattaagtaatcaagatagttttgaagttttgatacataattcagtgaagaaaaaaagagcagtataatgtgattttgagtgagtttcctgagtaaaactaattttgaaaggatttcggataaatcctcactgagttgatgtttcagctgagacttaaatggaaaaaaaaaattagcctgtcttataagttgccagaagagcttaccaaggagaaggaacagcagatgcaaaggccttgatgttggaacaaactttagatattcaaggaatagaaaggatcatgaaggcctggtaaaccatggtagagaatttgtgttttaagtgtgaaggagagccactggagcatataaacagggaatcatgatttgatctgtgcttttaaggatcactctggatactccatggagaagagattgtaagctcctcagagtgtgtttagagcacatactgctgcaatggtggctaagactaagggagtggaagtggcatgagagagaaatgggtgtatttaatacttttagatacagatacatagtacttgttgatagattaaatgtaatgtaggaaggaaaataaaatgaagaatgataggtttttggcatgtgcgactaagtggatgagtttgctatttcatttggttttgtgacattgtgcaaaaaataagctctttgaaatctaagtaagttgaaatctatgacttctttcccagataggatgaggattgaaaatgttggatttgatatagtagaaaaatctattgttattagaaaatagaattatcaaattttccagtttgagttacttagcattatatattccaaatattttcctagtttcttttgtaggcattttagggatttcaaaagcatttgccctacttttgtaataaactatttttaaaattaaaaaacagtgcttaaatacacaaatgtgtcatatacagaatactaaaaaatatggtcccttaaattttgccataaagtttctttattcctgaacagatgtaaaaaaaaagttttcttctaattcttttatatgtataacttgaaattgcaatgttagttactgagatgatagtgtgtaataacattcagattctatatattgataacatgcaaacaaatagtacattaaatagtttctataatatcacatctatctttctcttttttttttgccccttcaagcaacaaaatgcattatttttaaccctatgcaaccatctttcttaacctttggcttcaaatttagaacacttcttttcactgattggctttatagtagatattggtcataagtgaatttaaacttataaagttattaataaaatagttatactccatttcatatttctttttcaaaatgatttcatactaaaaagtttggaatccttgacctaagtcaatgccctcttcctatggatgagaagactgatgtttattgatgatttgattttctgaggcagtacagacagttgaaagtgtgggaacagaaatcaattccctctacttttttcaatgcaccacatttatttcacactgtccatgtagaatcatcagttaaaatgataatatatgttcaatccctattttcatatcaacaagaataatatgagtatataattaccagaggtctatcgtaataatttctctaatgtgtttaaagaacaagccagagatttttatttgatagagtatactgatagcatcaaactgaggatgccatttgtttattagggagaattttataatttagagtttttttcaaataatatcaacagtaaagtctaaattacttattgcctttaattctaggaatgtcgcattaagtgactaatgaaacggaaataactactgcccatgtaacttcataaatgcccttcatagacatttatgtcagagcaaagatggcaaaatacttgataatgacattatctccccctcacaacctttattttaatgctgtcaatcaaaactgagccagttaacatttctagagaataatattttatcaaatagataagttatttgtaatcatgataattcttggttggggcctctgtgataggctgaataatgtccccccacaaagatgtctacatctaatccccagatgctgtaaagatgttaatttccttggaaaaagagaatttgcagttgtgattaagttaaggatcttgagatggaaaagttattctgcattttccaggtagatcgagtgtaatcacaagagtgctgatacatgtgaggtagcagaatcaaaggcagagaagggatgtgatgacagaagcaaaagtgggaatggcctgctttgaagaagactggggccatgagccaaggaattcaggcagcctctagaaactggaaaaatcaagaaaacagattctctcccttgagtctgtagaaaaagaaagccctgccaacaccttgattttagtcccataagactcatttatgacttctgatctctcaaatatataaaatataaatttgtgttgttttaacccacaaatttgctataacttgttatagcacttatacctaatgaatacaaattctggcacctgcaagtgtggtcttactgtaattgatatctaaaaacatgaaaatgactttggaatcggacagtgggcagaagcttggaagaattttgaggcatatgatacacggcctaggttgccttcaacagactattagaaatacgaatgttaaagtgtgtgtggcaaaggtgcagaagaaaataaaggacatattggaaactggaggagaggggtttcttcttaggtggcagaaatttagctgaattgtgcagttctggggaaagccaaatttataagttatgaatttggatatgaggtaaggtgatttccaagcaatgttgaaggtgtagcctttccagacacacacacaaatgtatattatatatacacacttttataaaactatatatatagctatatatacacagacattaacacacaaatgtgtattacatatgtatacacttttataaaactatagatatataaaactgtatatctacacatacacagtcacacatatacacacatatatatacatatataatatataatttgttggtattatcatctatatgtagtggcagttcaaccttcactttgattatgaagtagcaaatgctacagaaaagtcttaagtatttttatacttagcaattaaaaacagacctttatattgaaactctacatgaaaaggattacattagttttattgcagtattatggtaatatgatttctgcctcttttttctatatttatccaattgcagggaaaaagtattaaaatccagtttggcctcattgaagcacatttgcagagtgttatagagcattggtttatgactattgccctattatagacaaacaaagtattctttatcctttatcagtgtagtgactgaaattatgaattccattcagtttttaatgaaatgtggattacttcaaagattatctatctgatttaataaatgcattagagtagaaagttaattggatctttcttgaatgaatggtgaccactatgtgtgattcataggagggaaagatagaatatgatattctttgagtttgttttatgtgtttaaaacttttaggttagaaaatcaatttttgtgtgatcggttttctcaaataaattatgtaacccctattgatcttacaaaaatcatggagaaattttaattcattttaaaataaaaatatcttaaattttgtaaaaatgggttattaaaaaatgccatatactgaaacacatgtgtagtttattgtgtttttagtttgcaggcagagaaaatgaattttaccccaaacatcagcatagttctagatttgccacctcctgtttttgacacagatctcaactgagcttctaattttggaatcttgttccagttcttatatttcctattctgtattcaagagctcattctgtattaactggtaaagaggttatcatttctgcttggtttatgtagacactctatattcttcattgtttaacaaaatatagaaattcaggtgcttgcaaatatgatggtagaggtgacaaagtgatactcatcacattttgtatatcgttagtagtggcaggaagagccttacagtatgagtattactaacccttacgtacaaatacagattatcttttcgttaacaatgttactctttctgagagatgttcatgtgagagatgttccatattttcaattcaaacaatcttgtaattgctggctgctgctgttgttcacagcacttggctttgcatctgtgcctcttacaattccagtcttgccctttgtttgaggaaacttcctggttcttgtatacctcctgctttcttgatctatttgctgctgtttcccaggtgaaaacccaactgggctatgcatctgaggtagggatggtttcactgtcctagcacatctttcctctattcaccctgatcaccatcatcttggttttgactcttatttaaaaaaaataaaataaataaaactgctttgtattatgcagctattatttttctgacaagttcagccactgtggagacagtttgaagtaaatgtggctcattgttggtggtctaagaatgtctaaagactagagcaaataagaaaatgttaatagagagaaggaaaacagaggataaaaattgaagttcctaagaagtatgtagctaaaatttcgccttatctaattcaggcattttctcttggctttcccagcacagtacttcttagcgatgataacaacagcaaccactttattaatttgctttttttaaatttagaattcacatcatcatggtaacaacaaccatcccttgaatatgtctttgttagttgcttaatttgctacacctaactcttccaccaggcgctaaatattgggactattggccatccattcagaaagtattatgtgcttcctgtctgtaatgcactaaatcagacattgtgctccaaagaagagggttgtaggagggaaggcatcacacctgtatgcagttactatgcagagcaggcttgggataaaaatagacattggccacatctgtgttaaatcatgagctgtgacccttctcatgacagttccccagctctgctaagacacgttctttggaagaagttgcttcacttttcatttgggtagaatatttacagtccaagtaatagatttcctataatttagaatttactaatacttcctttaaacaagtatatgattatccaaaatgtatataggcttttttgattccagttttataaaacaaatcactaatccaatgttgtgttttaaatagaaactttgctgtatgtaatttcagttggcattcgttatatatttacttaatgtgggcatttcttttcagacttatttatgaacatagaccctatctgtatttctacgtctacctgagtatagaaaaatacactgttttttaaattgttatcctaaaatagtggtctgaagcttgcatttttgaacttaaaatagtgtcttggacttattttcaagtaagaaaatataagtattccatagcatgagtatatgtttaatccttcctatactgatgaccatttagtttattcagatttcttgggattacatgcaatgatgcaattaacatccttggttaagatctttacattctctgttataggataaattcctagaagcaatattgtcaggtcatataatatgtatacattttaaataattacagccaaatcaccctcagaataattatacaaatttacattccaaacaatatgttagaatacctatttctccatatccttatcactactaattagtgccagtctttaaaagtttcgcttatgtgatgggcagatatggttaacattttgtgatgtttcatcataacatgattcagttaatgataacactgcttgttgtaaaattgttgcatgaagaatgaagagacagttgtaaaattgttgcatgaagaatgaagagacaaacgcagttaactgttcaacttgtgtggtgcattttgttgcactttgaaaaatgaaaaaaatcaaacatttaaagtttttttattgatggctgctccttaagaaaagcctggaaatactttagtttgctttggaatgtctttaagtgcatagtggtcctgtcgcatttcctgagctgcagtagattctaaatcatcttgatttaagataggcttttttgtaatcactgacagtctctgatttcagaattctgcagacattgtcattgagtggagcagtatctctagaagttataagaactgtactttttgctcttaataaaaagtaaagtgtgtcaaaataatcaaagtggaagaaagcatatgtaacagccatacaaataaattgagattcattagataagctagttggtagaggcaaatgtgaagaatatttttaaattcactactaagataatttttttaaaaaatgttaacttaaagttgctatttttaaaatttgcataatgctttgaagaatgacagtaagacaaatgtcatcacaatcataaaaaatgtgtataaagtacattagtattttaaatttctcctagaaaaaaaaattgctgcatctcttccaagatatataaccaagttagaaaaaaaagttagataaatatgcgtattaccagttaagttcagtttgacttctgcttaccagatgttttgatagaagtctttttcagtgttcactatgatgcctgtttctcacattgctgtgaaacatctaagctatatatactgttttttgataaataacatatggttttgaaaatcagtgttaaaaccacatgaaaatttttaaagtgaaaaattcagttttactctcaatataataattgttttaaaaatctttaaaaaataatgttaaatttcaccatgatatgtacagctgtctaaggagtctattacagggacaaatagaagaatgttatacattgctcaactcaggattacttccttttttttagttttagaagaattcagttttagatttaaccaaataaccagtaatgtatacatctccctgatctgttgtcatgagcacaaaatttatttactgacatgatgctaagaggttttctgcagatactccaaatctgactgggttttgctccatttttctttcactaatcaagacttcagtgaaataaatacatagtaaaattctaataatgctagacttatttcccaaatgtcttgatgttaagtgaataataaactccagatctgattttgtaaatattattttaagatatgcattcttaaatcttgataggcagatgttctaggaggctccaagagagctcaattgggtaactctctcagaggactgacttgctccatatttgcatcatacttttgtgtggtttcattcacaggcacagttgcccatcgtgcaggatatcattaaatgacctaaattaacttttctgcaggaagtggaggaatctcaggataggagaatccagttttaaatacccctgagacttaaattgattcagtcttaatctgggatgactcaaatgacttagtatataatgtctcttgtttctctaaaagagagtctctcaatgacagaggcctaagtctggagatcaagtatgtagtcctgttgactgagaacaggcagaaaaatctgattaatccaaaggaaaaaggcgagggaggtggcagcacagtgaacagatttgcacccaagcacaactaaaagaatgagttagggagggcggggagcggcggcttgtggctgtaatcccagtactttgggaggccaaggcaggcaaatcacctgaggtcaggagttcaagagcattctggccaacgtggtgaaaccctatctgtactaaagatacaaaaattagctgggcatggtggtgcatgccagtaatcccagctactccagagactgaggcaggaaaatcaattcaacccgggaggcagaggttgcagccgagatcgcaccattgcactccagcctgggtgacaagagcgaagctccatcttaaaaaaaaaaaaaggagggaggagacggaaagaaatcagttcgtttattttcaaaatgatcaaggatgaatggtaggttcctttacaatttttgatgtatctatttttttaccaactctttattttctttatttatttcagtattttagtttattaagtacttgcagtgttattaaacatagactgaagaatggaaatatgagtaagatatgtgtattaattttaggacactcacatcgtagtacttgtccatgttcctttttttgcctttttccattgatgaaggttatcttctctcttgctcatggctaataattatcactttttctcttaacaaattattttattgttgttatcatttcttacctacaaagttactattctctgtacaactctgttgctagcaaccatcttacaatttggttatccataagaccaaattttgtctctaaaacatctcctgggtgtagctgctcccatgaagacaatatagctacaatggagtatgaatccatataaaactcagtagtcttattgggctcattctctcacagccctgggagaagccttggttgcctgtgtctctttctcatattttgaggcatgcttatggaacagaggtttcccaaccctattcagaccccaaatataacaactgtttgtaagaccctctgtactatgaaaaagaaaaatccattccattccatttaccaacatacgtaatttcaaaagataaccaaagttacctaactttaatattaaaaagagctaaaggaactaaaacatatgcttattgcctaaactgttgaacacaaccacattagaagacagaaagaatactctgatgtttgccactattctgagaatcaccaaatgcaactactaattatgcagactgtcctgtagatctcaggatgtctatcagccctgccctttcccactaaatattatagagtcttaatctaactgggagacccaagtgtccctacacatttcctagatgcctccagaaggcactatctgctatactgagaaccattgctatagaactttaccttcaatatcacttcttatttgtaatgtctgtccctggtggctctgtagaagattttgctctcaatcttccatgagcaaatagaaacttggaatttttttttctgtttcctaaaatagaatacagatatgtccacacttggaaatatgatatatttttatgagtatatcttcaagtggcagatcataaggtgaaatcccaacttgccttatattgtatcattaccatgttgtcgttttgtgtccagatgacattggcagtaagcagcgaaggattcagtaatgttttgataaaaagagcattaatgtaattatttatttatttatttattttgagacagagtttcactcttgtcacccaggctggagtgcagtggcacaatctcagctcactgcaacctctgcctcccagtttcaagcgattctcccacctcagcctcccaagtagctgagattacaggcacttgctacaacgcctggataattttgtattttttgtagagccgggatttcaacatgttggccaggctggtcttgaactcctgacctcaagtgatctgcctgcctcggcctctcaaagggctgccaggcttgagccaccgtgcccagccaatgtaattgtttttaatctgcatcatcttttgaataaaaagacattttaaatatcagaaaatgaccactgtctaaattttctttaaccagcataaatggatgtaaactaagtagtttgcaaattttcatgtctgtttcacttttatctttctccttggtaatatgttttctgacattgctgtgaaacatttcatattacttaaaatgtgtatctttaacagatttttcacttttcagtttaaacatttcacacaatccacacgtatttattaaggacttatatacttgacataacaccaattgatgtttcagtcatcaaatcttgaacacctacttctgattgtctaacccttctttttcaaattaacaacaaaacaaaccaaaacaactgtctcatacaactactccattctccaaagagaagttgtaaattataaaactttaacagtcttattttttctttgatggcctacttaataaatctaaagggactataggtttacaaccttggagtgttgcttttgatttttttccccctgtatcagtccctaaaccaaaacatttacagtactgtgtatatttaataattttgtactgactgcatgaagatataaatgtgtgaatgaatacagcttgttaaacatgcaagtatatttcttcaaagaagagtttacggattctttttccttagcaaagggaagttgtattaaacattgtggtggttgaaatgctgctaatcaaaaattggtcatcgatttgaatacatcttatagcttttctatcatgttgttggtttatttctgaaaacacaagggagaagttgattgggctgccttagctgcctttttctatggtgacaggtgtttagactttaatccctctaactgtgcacatagatgtttctggtgaaaagaatgtactgccctttgtataaaaaacataataatgataataatgtaagtttgagaacggtttagtctacacagttattgacaagaggtacagcttgtactggaggaccagtctggattcaagaagatggtcctaagtgtaccgaagtatatcttttcgtatgaagatataaagaatagaaatatgagtggtatttgaggtgtccgcatcctctttggcactcagaggactctaatcaaacccaatgttgtgtactgaactattcctgacttgtgaaattcatcttttatcccctactttaactttttttttttgagacaaggtctcattctgttacccaggctagagtgttatagctaactacagcttccacctgggcccaagaaatactcccccctcagtctctcaggtagctggaaccacagacacaagccatcacactcagctaattaaacaattttattttttgtagaaactagatctctctacgtagcccaggctgatctcaaactcctgggctcaagcaatcctctcaccctggcctctcaaagtgctgggatcacaggcatgcaccactgtgctcagctaccccaattttaccttttaaacacaaaagctttcattaaatgtaaagccaccatttcctttgactttcaaatccatgtatcagtaaaataaaacaaaaatttatttgaatgcaataatagcagacatatgctgttctaaaatcctcagaaatctggcagtggaaactgtgaagatagttatgatctcatgaagtttgaatatagtcctaaactctttggaatgagagatttgtcagctggattttcatgctctaaatctgacttcaataactttcactttctgccaagatgtatccattatacctcagtatctcctgatattctccaataaaatccactgtcaaattaaaagcttagttctgtcgtttgtgccaggccccaagtgctacccttatattccaaaatcagtagcgctttttccaagttattactcagggagtataaccaactagaaaaaaatttagaaatactagaagcatgttctcctagatttcctacatctatccctaccaacttcccaaagagccctgtagtatcttcacctaccttcctatcagctattcagacataaaaacagctgctttcttcctgggaagatcacgtaatttagaactggcttggggtgtacctctgggttaccaaaaatgattttttaaaaatatctgtcattcaagaaaataagatctggggtcaggtccaggcaatattgtcctgagggtgcttttcttcttctcgtggctgatattcccgcagtgacatatgatataatatgcactaagctgatactgcttcagtaaccatgtctgtgtctgtgacaggtgctactgactcctttcttcatgttattgatctaaaatattttttaaaatgtagaatctacaaaaccctggaggcctttcatccttggaagctggaattattgcatcttttcatccttcttaaagaggggaatgttttcacccttacagttaagttgacagttcatatgcgatgtttacttgactttttatatctggttacaataaatgtataggctgttaacacataataaataatgactcatatatttgatttaaaatttcctggattatctataatcagaatttagaatttctctcctagaagtgtggcgagctgaagctattagagctgtggcctttacaatcctttaacggaataacccatctcctgttgctgatctgaaccgcataactggctaaactagtgcaggcagcatgattcttcacacacaaccagatgccagaaagaagaaaaccacaaaggggctgaaaaacacagcatagagcccagaagcaagagggtaaggtggggcagaaaccaaccagcagtgattggaagggaagattaagtcaggaggcagggctcaaagggcatctgaaggtgagaggcagcagcccgaggatgcctcaggagtctgcgttgtacaagaagctggacattagagataggtcgcaggtcaaaatcagatagaattttgcgatcagagcagacacagcaaaccagaagcacttgaactgttcaaatagcaccttctttccacagcaagtccttgctgttgtgactgcgaatacactggtccactgaagcctgtgacacttgcaatttgggagcttatcacagccggaggaccctgacacagggtgagggtgcaggaaagacaggacatgagattgaggatgctgactcagacaggtcactggaccgttccagtgtttttcttacagggaaagagtgtaggaggcagtgcatctctttgtctttgtcacttaacttttggtgttctttaaactgttctaaattagttcaagatctacaaattgaaggctaaagaagggaggataaataaagcccagcccaagcagttttgattgtagaaacatttggaagtatttgggttgttaggggaaaggagcatagctgattttttttaaattgatttggagtttggttatttgtcatttactcattagttactttcctccccaacaataacaacaaaagataattaccatagtctgttcttacatgaaacactgagaaattttatgtagacattgaaattacttcatcagtttcttctgtgaatgattcatttcacatttcccagtcttatgtaaattactctgcagcatttatatagcattagtgtcatgcaatttgtatcattattgaacatttattttcttttcaaacaaagtgcaaagtgccagaggatgggaagtatatctttagctgcagtttgaaagaaaatgtaccaagcttggtgtcggatgacctgggttctacaaagcagtcgtgtacgtttagccaaatcacctgttcaaatctaggttgcccaaactataaatgcacttgaatgagtgatttttcaagaatgtggggcaaaatgaagtcagagcattcaaggctgtggtatcttatttctgtttcagctactgtgtctgtgctctcagtgtttcatatattgggtccctacgtatgattttattttttaaatttctactgctaataaaagtttcacagatgtgatagtgtccagtatttctttcaaatttgaagtttcatttgatttaatcattttatctatcatgtcatttagtgtaatttttgaacctagtaagtgtctaataaatatttgctggggaaaaaaatgaatgctatggttcaatcatgcaatactcagatgttcgtaaccatttccatgtgaaaagtttagtataggctgtagagaatgacattttagacttttgaggggaattatttttatgtcagcttgaaattcttcttgaacttgatttctgacttgggggaaaaaaagcaagcctgatgtgcacaagctttatacagagaatcaactgtttttaaaagaataatccagctgctatctgatcagccaggtaggagttgttctgtggaaatgaagaagccctccattttcagtcagagtcacgcatataaaggctttgataagattaaaataatccaagaatgcaatttcaagatgcacagctagaaacagcaactaagaaatatccatatcttacaggacacagctaagggaagagtcaggttttaaggaccgtctacagataatgtcaggatgtacagataaatatgagcaactgctgattgagctagaaacactgctggttaagttataaatcttatgatttttacccttcaaaatgcctctttccttgctgctttatatttttttaaagagcggagtatgttgtcacttggaggttgtgctgctttcctgtgactttagtcacctttggtgccctggccagatcccttttaccaagcctgtaaaatgcccagtttccgtcagtgttagctgctattggctcacagcccccacttctcttcagaatcacttgtagctgaaaaacatttactttgccaaaccttatgtgcccatctcccagcactatcagctcatatctgatgactaactgacatggggaatacaaaaagccagtgccctcacttcattaggtcaactctggggcaattcatgctctagtgctccccgtgacatcaggctgaagttagacttatgctaatgccacattctcacttagctgctttccctttcctaccctactttcctctctccttttcatctgacaacactcccttaataaatcatgtgcatccaaatccttgtcttaggctctgcttctagggaacctaagcagtgatatttttgagagtatagattctttcttcttttatctttcatcctcaatctccagcacatctggatcatgatgctttacaagtattttgaagagtaagcaaagtaagaaatttggccttcatttggtgtgttagttagtccttgcattgctataaagtaatatgtgaggctggattattattattattattattattattattattattattattattattattttgagatggaatctcactctgtcacccaggctggagtgcattggcactacaacctctgcttcttaggttcaagtgatttttctgcctcgcctccccagtagctcggattacaggtgcccgccaccctgtccagctaatttttgtatttttagtagtgatcgggtttcaccatgttagccaagctggtcttgaactcaaatgatccacctgcctcagcctcccagagtgctgggattacaggtgtgagccactgcatgcagtcagagactgggtagtttataaagagaagaggtttaaatggttcatggttctgcaggctgtagaggaagcgtagtgctggcatctgcttctggtgagggcctcagggagcttacaatcatggcagaaggtgaaggggaaccatgtatcacttggcaagagagggagacaggagagggaaggtccacactctttaaacaaccagatctcacaagaacactcattactgtgaggatggcaccaaggcattcgtgagagagccaacccccaaaaccaaaaacctcccaccaagtcccatctccagcattggggaatacatctcagcatgagatttggagggcacaaacacccaaactgtatcagttgatcaagaactgaccatggaagatggatagttgaagtcacaagcagtccagcacaattctaaccttaccatgaatctgaattcttagctcactaaagatttaggaacagaattggggagtagaattatggtcatgtaaaaatagagtccgtttaacatcctaaccttaaatcagaaaccatcaaagcatcatatcaacaaaaaaattgttttcacttatgaaaaatatgaatattaacacaattttgttgcacacttactctctgccatatgtcttacactaggcattgagaaaatactaaaaatacataggatatgttccatgctctcaagaagttgtgaattgtgaaagaacctgatagttgaagtaataatttcatgcagtgtgcctaaacatgaaatagaattccatacaaagtgacatttaaataggtagaaaaaccagagaccatatccacactggtaacagcatgggcagaggtttgcagttagacatgaaagttaatgcagtgttcaagaatatactgaggagttagtaagaaattaggctaaaatgtatgttgatacagatatgagaaagggctgtaagactcaagattcactttatcttgagggcagggtggcagctatcaacagtgctaaagcactttctcttccactttaaaaattaaaacagtgtggtaaccttaaaaggtgttctgaaacaatattctaagcaactgttatcacttttgctttttccttttttttatcaggtgcttacttaaacatttctcataattgcaaagattgtgacttgtaattatttgtagttactattttaccatgagctttacccacatttttatgtgttttaattttaagtggctaaatattattataaatagtgtgtgcagtataatttatattcgtcattttcattttccctgaaatctttgtaggctattaagaagaacaatgataggatcatatttaagttttagaaaaatgacaccttaaaagctgcaggtagattaggatgagtaggacttggagtcagaaacttcaataagggagtggctgcaatatagactaggaaagaggtgataccaacctgtcagtgtcctcatcggtaaaagaagatacagctgggcacagtggcttatgcctgtaatcccagcactctgggaggccaaggtgggcggatcacttgaggccaggagtacgcaccaacttggccaacagagtgaaaccccgtctctactaaaaacaaaaattagtcaggcacagtggcacacgcctgtagtcccagctactcgggtggctgaggtaggagaattgcttgaacccaggagaaggttgcagtaacctgagatggctccactgcactccagactcggtgacagagcaagactctgtctcaaaggaaaaaaaaaacatacaacaagcctcataagtgcttgtgaaagctaattgaaataatatattaaaagagtttggcatttagaaagctctgaaacgatcattcatttaacagaggaagctatgaacattttttttttaaaggtcagtttgacttttaggcacctgatttcctgaaggactctttgaactctttgaatgtgggtactgttttatgcattttcatgtgataactaaacagcctgatttacattcttgcccaatatacgtatttcttcaaataatgaactaatgaattcccgggcaataaataccttttggttaaatggacaaacagttctgttcagtgggaaacatgctagtagagtctgcttttaaaggaattgctgtatgcagtattctaagaaataatgaggaagtatttttacttcaaaatactttgatcataatatgatgataggtattttcttctcttgcctgtgaaagtgtgtgttaggtatgtacattatggggccaaactagtgattgttgctaattaggatatatgtggcgcattctatcaagaatcccagttttctgggcactgtgagctgtaagtcaagtcataaaaaggagtgaattgtctttttcatatatagcactgaaattgactggagttaattatttaatgcctacctcccctactagactacaggctgtgtcacacacctccctcagcatctagcacagcaaatggatttagtaatatttattgaatagattaagaaatacagagtgaataaaataggacactggttggagtgttgggtcaaccacaattttggtgtgatatattctacatatcacagtgagaaggaaaatgatataaaatgaataatatcctccttaaagtactatacaaaaagaatacttcttatattttttcaagatgatgtaatcttgtcaaatatataatatgttgcatgccagtgctttcttaatccttaatagtaataccagtaattgtatattaagttcctgctatgtgtcaaatacttctaggtactttaaatgtatattcagtaatcttcagaacaagcctagagagcagaatttagttatttcattgtaaagatgagaaaagtgggtctcaaaaaaagcagataacttgtcccagatcacacagtagtttttcttggtacctggagtgattttcatccctctttcaaatacaaccctttggctattgggaagtagctattacaactgtattttttctttaacttgatgtaagggaaagaccactttacacatatacaaataggagaaagttttgccagaccttctgcagctagtatttacatgagtgagtagagaattgtaagaggttctggtagcagtaaaaacaaattacaaacaacggaacatgaagagaagatgttgtctaccaacatctgtcaaatatggcagatgatcttctttgtcttattttgttcaataccactcaatatcatcacttaggcctctctctcttactgtttagatctcttgggattctcttaattttttaaagcctataccttgaaaaattctgtttaaaaatacattggaaagcatatagattttagtaggctgaataatggctactggaagataccaggtcctaatcccaataagctgtaaatgttatcttttagggaaaagcggtctttgcaaatgtgattaagtaaaggatcttgacaaggtagattatactggattaacagtgtgggccctaaatccagttacatgtattcttataagagcaaagcagaggaagatttgacagaggagaagtcaatgtgaccacagaggtagagactggagtcatgtaaccccaagtcaaggaatgccagcagcactggtagctggaaaaggcaaggaatgagttctcttctagagcctcagcagcgagggtaaccctactgacaccttgattttggcccagtgatactgctttggggccctctagttcccagaactgtaagagaataaatatgtgtggtttttagccatcaagtgtgtggcagttttctgcagtggccttgagaaactaatacagacatagaaaattattttatgactttttcttttagatgcagttgttaagtcagcatttgatcttatttgagctagatagaaccagggttttctaatctacaaactattgattttcatcttgatttaaatgtgtttacttattcttcctctataaggtaggacaattttgcaaaagatgtataagaatgtgtgtctcctttcaggttcagctgaaataatcttcatataacaaaagttagagaaaacaatctgtctgagccagagacttcgttatatgaattcatacaaactaatgaaggaatacaaaacttggcctcacagggagagagtggagtgtcttatgcaaatctttgttgtcagccacattcctacatgcagaatgcaaaaaccatgtttcagtttgttgaggatttggaaatagcttgagataatcttaatttaaaaggactggcaaattctttcagctttgtagaatttattccacatatgtcaaagacaaacttgttgtactgcaaaataaactagtactgtgtgatcttagttgaaaaggtaaatattacaatttacattctattctctcatattcattcttttggtacatgttaataaattgcaaaactatattgctgaaaaatctaatgatcctgaaaaatctaatgataaattctagcaattatcagtgattacaatataggcctggtttgttgttgttgttgtttttgtttttgaaaaggaatcttgctctgttactcaggctggagtgcagtgccacgatctcggctcactgcaacctctgcctcccaggaggttgcaattctcctgtctcagcctcccaggtagctgggattataggtgcctgccaccatgcccagctaattttttgtatttttagtagagatggggtttcaccatgttggccaggctggtcttgaactcctgacctcaagtgatctgcctgcctcagcctctcaaagtgctgggattacaggcgtgagccaccatgcctggccataggtctcattttgtacactaagaaaatgtcaaattactaattttcatacttagtgctaaatttacatttatcataaatgtaaacatgtaatagagaaccagtaattttttattttccttaaaaatgatcctggtaaataagagaattgattcataagatcatggtttgttgatgccatagcaacataatcttatattgagaacatcatctgttacaatgcaagtagttgtggccatgtgcctagaatagacttagttattaaagtacattgtgatatgatagaataagatttgtccagatgtttacagagctcttacaaggaattattttagtctgtttctaaattattttagtgtgttcatctgggttgaaatgttatgtgcttaaaggattgagttactgtgatgacttggaatatttaagtagctttgaattgtgcgggtatgttaaatgcctgtttgggaaagaaaaataatatgagtgaacagagattaaaatttgtgaattatctgattgccctagagatgtctctatttgagtttaaaataagagattggcctggtgtggtggctcatgcctgtaatcccagcactttgggaggccaaggcaggcagattgcttgaacccaggagttcaagacaaacctggacaacatggaggcacctcacctctaccaaaaaaaaaaaaaagaaagaaagaaaacattagccaggcatagtggcatgtccctatagtcccagctactccagaggctaagctgggaggatcgcttgagcccaggtgggtgaggctgcactgagccaagatagctccattgcactctagccctggagacagagtgagaccctgtctcaaaaaaataaaataaaataagagatcgaatagttctgttttaaaatagtctaggtgagaaatgatagtttggttttttttgttttaatcatattgtttaaaagaatacttcccagcagagttttattgggaaaccacaccaaaataaggaacatgctgggggcaaattcagtggtgaacataaatctgaatgttaagaagacaaaggaggcaacaccagctccagggcagaaggagagttgagaaagttaggaggggctgacactaccaatctagcatccagagaggtttgatgaagaaaatttgactttagggagttgtgaatttaagatcagaagtgatttatgcgtagaaaatgatttctgtcatttcacctgattcttgtaacttcagcttgaagtttctaatttcaagaaaattagaaatcactcgtcagctaagatttggggaaaactgttaatagtcacatgtgatgttattaacaatttattggatagctttatcgatcctgtttctcaaattatacttggttttacagattttagcctttggtttgactcttcttttgccccatttttcttggctgctccagctccactgctgagttcactacaggtcagagaactgttcagtatttttaaagcagaaaatgcggtgaggatgggattttgtaatgtaagtttttaatctccgtatctgagcattttggttcgtgcagtgatcccaagtagctgagatgaggcaggctccagtatcttaacctactaagtatgtgtaaacttgatagagaacacaattttcctttaaatatcttagctctctagtctctcaaattgtgaaaacatattgggggcagattgtgaaagaaatatgttcataaaatataaattcagtgatatccatggaaagagcaaactcagagtgaggcagatggaagaggaataacttggatcatccaggtgggttaggtgttccaggaaatactgaggacccccagccagctgtttgatctggcaatactggaggacggtgcctcagcgatcccttcaaaatcaatgaagatttttcctttactccgtaagctgggggtcattgacagtagttggactcatttggagtgaggtgcatagaaactggcttttaggaattcaaaactctcatggaatatgtgaaccacttggattcagtggatttgaaaataatcgaaaaagtaaatatactaaaggtcaaggaaaaatgaagtcacttgcttaaaggctgctgagtattagattttaagagaagaaacgtaagggaccaaaagttttcatggcaaaaagacaaaacaagcacccctctgtcccccgaccttccagccccgctaccaacacacgcagtgttttatgaagtggtcgcaggagaatctgaagcagccataaagaagaaaggagtatgagagatccaactgtgccactaacaggcacttaatttcttctgagaactaatttataccaactactctagcttttcaaatagcaagcaaaagccaatttgcatttacattgtaaaactctgttttccaaacagtggcgtacagagtgttggtggtcaaatctctaatgtaagcgagggatttggggatcaaatatttcctgaattgttactctttgctagagagtcaagataggcgctggtatgtaccctccaagaagaaataaatggaaaacacacacaggaaacaaacctttataagctttcttcaacattatctcatataattcttagaatatatataaaagaatattactactacattttatagacaaagaaactgagattcaagttatgtaacttccccaactctatacattggtgaatggtcacttcagaaagccttgctccttctaaaactccagcctacctctattaggctgtgatttaaagttcaaatgagaaacacagccaacaagtgcagagaaattccgaagtcccttgggggattgagggctggaaaaggctttgtggaagagatgaaactttctttctttttttttgagacggagtctcgctctgatacccaggctggagtgcagtggcacaatctccgctcactgcaagctccgcctcccgggttcacaccattctcctgcctcagcctccctcccgagtagctgggactacaggcgcccaccaccacgcccggctaattttttgtatttttagtagagacagggtttcaccgtgttagccaggatggtctccatctcctgacctcgtgatccaccagcctcggcctcccagagtgctgggattacaggcgtgagccactgcgcccggctgaagagatgaaactttcttatcaaaagggtccaatttagacaagggaagatgttgagtataaaaaggttgattatctagaattggacaatctatagcccactgaagtattttgggtgtgtttgttagatactttgagaattagaaattgtgaaatgtagttattagaaaattttagacagccaagaaccatttaaaaataaggctcccatcttttcattcattcactcaaggccaaaaaatattttaggattaaaaaccaatctcaaactctaaaatatttattaataatttagactttatactaaattatcttggaaaagctagagctcaactaaaatcattttttaaatctggttcatctgtttaatattaaggcagtctctaatttagtaaataaacacctctaaaaattgtagtgcaacctctattaacgtgatttaaaccatgttgtgtattctcctgagatatgccagattaaggaattatcgaagccttggtggaaaatgacctactcaaaatgaaaatggaattcataactaaaagcatcccaaaaaacagctagtcttaacccttcatttcgtaaataagcagagtgggaataggtttaaaatgtcgaccatctttactattttagatcacatcacgttcttataatttgagcactagtaaaggttttatttgttttctatttctttctctaatattcaaatgtgattttgttcctgtttgtgctttgaatggcatgtttggatgactgtcccagatctggcattctgagattgtaccactaaaaatgtcaagtgcatttgccttttaattacatacagtacctggattttaatattttagatttttccctgaagaagagacttttctggtcctgtagtttgtgggagggaaaaaaatatcactgacattatcatgaagctttttcccccaacgtctccatatatccacatttatcatttcagaacaatttcattttgggtcaggtttagttgttctgtagcttactttgctataaacactatgtttaaatatataattccgcactgtttgtttgtacttctttctcttatttcccattaatgttcagctcagcttgttttactcttaataggccattactacttggatgtcacatatgtaataatcagtatgtggaaggtatagtttcttgtgatttacactcctttccttcctttacctttggcataaatgtgaaccagctcattactttccagggtatttctttttttacttccccaaattaaattttaatttcatcctattgttattctctgatttttattatttcaggtgggcaaaaaagtcttatttgtcaatgaaacaactccataaccactgaactcccttttgcacctactacatagacaaggtacttaaagcatttttgcttttgagatgatacagttcctcaacttaaaaaaacccacaccatctacctccgtgtcttcttcagaaaggtcttctctcagctccaaatctaacacagtcaccaaggcactccaccttgtccttctattttaattctcagtatggaagtcctcactatcaggtgatccttgtttacttgtctattgtttactagacaacacagggatgtaaactgcacgagagtggagatattctctgttttgttcagtgatgattcttcaaaccctagaagtgtgccaggtacatgccagggacaacaaataattcatttaattaatgaaaggaaggaaacaaaaaagtaaatgttttctttgtgtgtttaagatggggcatggaacatgtatttttttttttctttttgcttctaaggcttcctctcagaaccctcccagattccattcatttgtctatccatttaagtctgcttttatttgtccccaaaagaatgtgactgactgccaatttatgtgtatttatatctccccagcttttcctttctttttgttaggtagtagttgaggttgacacctctattgtatcccccacctcacccccatgttttgaaaaggcagtgttaaacattactcctaatataggcagcttaatcacatttctcccaagtgaaagtgccagatgggagtcagaaagcataggctatatttttaattatgtcagaagttaatactagaactattaaaaagccactttcctctcctgagattgtctttctttatttgaaaactggagttggactttttttgttgaatgattctaagaaatgttttagattgtcaagaaatcagatacaaattcatccccctgtggaggagccctatctgtgcctcttctgtaataccagtagccatggtatgtattgcagtatgatgctaataagtacagtcatttgagtacttaccatattcttcttctagtttatacgctctctaaaggaagaacacttgttcatctttctggttttttagcctagtacaatgttttgtacccatcagataattcaacaaatacgtactaaatgataaacaataacagattcttatctctgttttttttagaaagtagacttccctccatctaatgctgcttctgtgatgctataatatttatggtgcagaaatctagatttagaaagagaactttattcgaatctgtttatacattccctaatacttactgaggctctatgaagtaccagatattgtccttagcactttacatgtttcaatacatttaatctttgagtcaatctagaaggtagactcaatctccattttaccaataagaagtgaggagcagtggttaacttacctaaggtcaacttgtggcaaagctggaattcaaactctgattaatggttttgttttatcaaaaaaaaaaaaaattaaggccacctgacaagaatgttcactattagtgtttttccagagatgttgaagctctttaccaactgatgctatgaaaagcagaatttttctcttaaagaatgttttagattttataaattagttcagttaaccctagcattaatgtatttgtttcaaaaaaagtttaaaactttaagcagtatattatagttgataaatgctcttatataagtagcataccttgacaaattatgagcatttttaatatgttacctattcattgggcaaatatatattaaaagtttataatgtattggtaactatgtaaaaatcattagccataaagacatgaatgagattatatctttgcccttgattcgctccagacctagtgtgagttgtagacttgctgagaaatatttgcaatacaatttttatttgggttatgggaaaatgattaactggtatttagaggtgagagggtagttaagggaaaggtgttaggaacactaaagaacataaaagcccatgatcccacttcccattttggaagcctggcaaattaggttctcagaggacctctgcagaacagtcctaccctggataggacacatctgtggatacattgctggacttacagtggctggtggagatatctcaggactcactattctgccaaataatatatatatatatatatatatatatatatacacatatatatttatttatatatgtataaatatttatttatatatgtatatatatttatttatatattatatatatatagagagagagagagaaggagagagagagagagtgagagcgagctgaaaacagtgagcaacaggcagaaagagaggttggtaatacctgaagggggatgctaaaactatattgcccttgagacttttatcttcagactggtaataagagtgttgcctagcctgggactcccatatggagctggcagaggtggtctgaggtctgagacacctcatagctactggtaggagatgtaaattatctttgagatgaaagcatgatcaatttaggcctgcagggttcccacaggctaacataaagcaattaactcacaatcaaaggtcaccaagcattcttgaaagtaactcactttcaagagtgagagttagcagaaacaacagatgtaaatcctcaaaaaaactgcaggtattgggattgtcaaatacaaatagccttgtacaaaatctctaaagaaataaagtgcaaatcataaagattaacaagatgctatcaggaataactaaacaaagatccgtttacgaagaaccaaatggaacttgtaggaagggaaagcataattgttcaaatttaaaaataactctttggatggacttagtagcagatttggcaaaatgaagagataatttattagctagaatttaaatctgaagaagttacccagaacaaaacataaaaaagagctaagatgctcaagaagaaaagaactaggcctgggaatatctccataatatatacaatatgttacagaactatagtagttgaaatcatttactgtcagcacagaataatatgtttcctctaagaataaaatggaaaatccagaaagtgactcatgtacttaacgtaattttgatataggacagaagtggctgtgtagatcattggatcaattcaaaagttatgcacaggtaactggatatgtatgtggggacggaggaggacctgaaacaactttctactatacatcttggactcttttaaaactttcaaataaaaaagaggatttttgaaaaactcagctttgaaggagcttcttaaacaataggccctaaccataaaaaaaaagattgatatatttgacttcattaaaattaataactgttattcataccataagtaaagtaagaagaaaagcaactgatggctttcagggcacattaccccaaaatatggcaccttggcatactgaatattttaacctgaaaaaagttggagaaagtgacaaaaacaggaagatctctctgaccttcccttgaagcagatcataagaccctcatatgagaagtgtcctccttatagctaggggggaaaataaaaagcacctttctttccgaagataagggacacatagaagaatctgaacaaacaggccttgctaagttttctgcagtttactatacttagctcatactcttcgccctatcatagtcctttataacgtcacccttcatcaaacctgctataaaaacactcgggtttaactgttgcattagttcttcatttccttatgaagtctaccatgacttgtaaaacttatattaataaatttgtatttttctcttcttaatctgtcttttgtaataggggtcctagccatgaacttttaacatcttgaaaggatggttttcatcccttatacagtctgataggagaagatatttgtaatacaaatttcagtcaaagctatatactgagcatttcagagaaaaaaacaggtagagatatttcaggtatctcaaaaggtcattttagtagtaatcaaatatgtattacatttcattttctactactgaagtgacaaaaatcaagaaggctgataatacaaagtggtaagatataatttaaatggggttggcatacgctgctggtgggtatgtaaattggtaatagtttggtattatcttgtaaagctgaatatttacaatctttgttttatcaaaatgggatggataaaactcagggaccacagtttgccaactcctaaaataaagagtatttgagaaatggtgaaaggattttaatgataagagtatatgaatgaaagtgtctcagaagatgaggttgaaaatgttgattggcacctgcttgtgaaaggccgtatgtgtcataacttttgccttttcctcttgaatgtaaagcagtgaagtcatttcttcgcatttaccttttagaaaactcatccaactagcaatatgtaggataaatctgaggtagccaacatgggaagcaggaggactagtgaaaaaacaagattgggtcttgaaggcagtcgaaggtggggtggagaattcagaaccaatttcagagagaactaagcagatagaatcaactgtgtttaagaagtaagacagtgcactaacgctctattttacctaattgaatgaatttagtgggaagcttgatgaaaaattaatatgcacattaaaacatttcttcttcattactatgaaacaaaataatattttactttttttaccattatatacattcctaaaatatacttattttattgctttcttaaaaagtatttctgtcacttcagaattttgtacagcattttgaactgtgtttttaaaaccaaaacaaatttagagactctaagactagaaggagatgccttaagcagtgtaaaattaattttcaatatctgcagtattaatctgtaattttatttcttagttgtttaaagtcttcatagacttttgcactattttccacatcagaaatctttggatcacgtccatatcattattaaaggagaataaattattttccaactactgttaaagcacgtggcatttagctgctctcttttctcaccagtaaaatctctggtagaccctgttttagtcagtgatctaatactgggcaagtttcataagatcacatgcaatgaggaagccaaattacttcaaaagatcattgagttaaataatacatacttcaagacacccataaggtttaggtgtccagtgtggcagcctgtgtaataaataacatgtgctttacaaaacctgtcattgtatatttatataataggcagctaagattttttaaaagctgtttttcagtaatttcatttttcctattcatagtttttcatttctatgtaatggacccaaagaactgacatctagattatctctacctagagcagcagcgtctactactatttctactatcccatgtgttttagtttacaaaaacctttcacaccattatgttacttggtattcctaaaagctacacaagatgggtaatgttattaattttttttatagatgaaggcattcactctaaaagattctcacttgctcattgtcacacaacagataagagaacaaactaagaatcaaaacagggtcttgctgatccaatcccttgtgctttcagtgacactggacttttcttgcacattggtttggtgataggtggtgacagatggtggaaatggttagctctataaaggaatgtaacaaaggggcttgaaatttccagagacaactcagaaatgtttgttatcaagttcatcttatgttaatgtccacaacagtaagagatatgtctgatcagagacatccttgtgttttttaaggagataactgattttctatatgccagtgcaacctagcttaggcaggcttagtggtggtctttcatttattcaactaatattttctgttctgttgctcctttttaggtcctactagaaattcaatggtgagcaaaataaatatggtttttgctttcatgggctttaccttaacagcaatgggaagctattggagggctctaatcagtgaagtgatatgatacagttgaaatcctagaaaataccgtgtgctacaatgtgggttttgaggtggaacaggcagacagtatattcagagatttaacataggtggctgctgtgtgatctgcctgagaggatactgatctgaatgaaggtagtagcagtggggatgggaaaagtgatgacaaagaatatttaggaagtagtaattttgtaactaattgtgtgagaaagtgactgtgcattccagtttgcccaagataattccagtttttgttttccttcaaaagcatcccaatttggatgataaatgttaatcctagagataaggaaagtggaggattcaagaatgatgcataggtttctggcttgaagaactgtatggatagttttgccatttactgaaaggggatacactagaaaaagaactggcatgagataagattatgagttcgggttggacatggtgtgcttaaggtgactgtcatacattgacgtgaagacatattaatcacatgactccatgggtcaggaattcgggttgcaacttttggtcagagatatatcgattagagagtgatcagttatcaggatggtaactaaagagatgaaaatggataagatcaccaagccagaaagtatggaacacagtgtcaagaggcataggtccctgaggaactcaaaggggcacctatttttaagggatgagcaaacaaaaatctggaaaggagagaccagagtcctcagaaaactaggaggtacccaagttcatggaagtcccaggaaaagggtgttccaagaaagagggagtagacaggaatgtcacatgctattaagaggtcacataaaataagactagaaaagtacacattgaattcagaaacttgcaagtcattagaaacattggttatggtggtttggtgtggatgggggacataagcctgccggtaggattttaaagaatgattgggaagtgagtgggaacagtttctcagatctataactgaaaaagaaagaaagcactaatgaaatgccgggaggatttgcagaatttgagtgacaataatgtctctgaagacaccataagattacttaatacattgtacttacaggcttctatctctaatgtccattatgaaagtagaagaattagtttgcctaatcacagctattaagatagttttaattttttaggtaaatttgtgtgactttaaagctatttcatttttaagtagtgggagcaaggacacaattgatcaagtcactttagctatttttaccccccaaaatgcatcctagaaatttgctcaataaaaataaaattgtgccttagttttttttctcgttgtacaaagaattatgcttctcttggcttctgaacactggggattccttatatgctctttggcagataaaaaaaatggtaaagatttatggccaaggaaagcatttctgaaaaaggtgctccacattgtctttgtgtatgtgcagaaattataaacagaactcaggggcaccaccactataatagctttttgctctctttgaagaaaatggaaaatgctgacttaggggctactgcttgtatttcctttaatgaatcttctaagcttgaatgattttaaataggatatttatgttcctcggttatagcaagccaagtacttaaaaaaatacatgtgattaaaatatccaaactaataaatatatacagacatatttagtaaaaactactgttcatagtagtaatagtaatgatagtaataaatgccacagctaaagactttgaggagaattcacagtcaaggaaaacaaccaccaaatcacatgtatttggagaatttgattagacttctatacttaagtttaataattatgttgaagattagtgaacaactcttggcacaagaattgtcttgacagacaggcagccttacccaactcaaataaataacttaatgggcttttttttctttattaaccacttggtaaatgtgaattgaagtctagtttttaacaaagacatatagattatgactttattatctctgatttgcataatagattatgaaagtctcaatgctttgtactcttggtatacctgcaagcgttttagtttctatctatgttaaaaaaattactttcagatttggctttttatttctggaaatatgtttacatgaattcattaacctatctatattacttgtaagatcttaaaaatgtcttcatcccctgagtttgaaattgttttacccatcaccctcatgtcagttctgttattttattactaaacctaggtaatagtattaaagctgctgttcttacttcatgatgatagtttatatttgcacctacatacattatatatattatatttgtacccatatacattatctgcttctggtagggattagcagctctgaagatttttgtaaaatgtagcatatgcgactcataataaaatatatttagaaaattataccataatagcatgtattttatttaattaaactgttatgaaaaatactgacctcattaagcaagaactgctcttccagagaattttcagaaacatttaattctataactcagatatgtcagaaaatcactaagggatcattatcattagcccctgaaagccaagtgtctcatagaacctgaagaaagtagtctttgattagtgaataatgatgatttgttgcatggactaaagctttttttctagagatttctacatcaaacttctgtttctcttcctatttgaagtagtatctgtggcaaaccaatgtaatttgagttacaagcaatgactatgttccttttaggttttttcattcaactttgtaatatattccacctgttttcaatatctacatatatagagatatagatatatgtatatatttctaacgtcgccctggaaaggaaaagatctctaacatatttactacatgttttggtaaattcaaccataaaataatttgaaagccttaaggtatctctgttcataattatgaggttagaaattccctacagccggaatatatggaaagtgtcaagtcagaaagggaatctcccttagtttcccaaaatacaccagccaaagccttgctttttctgcttgagaataatagttagtgaatctagtctatggagaagtttttatgcaattgaaataagataaattaagacagttatagtgaattgttttacaaagttaactgttctgacgcttttatttgagctatgtctttctcaccagtttagctttaaattaccattttatataatgatatttacattagatatatttattctttcagatttcttactttgagaaattaatagttaacctcaacagtctccttttggcagaatctgtggctgttgggaaaagtggagcagatacttggatgtatagaactatgggttgcggggagggggatagagaagccaagaggagaaggtaaagaagaaaggatcagaatgtagacaaatggttgatttttaagagctgattaacagattgtccactggaaaggcatgaggttaggtttagagatttctttgcgtatctgttcatgtggacaccatctcttgactccaagtgcaaggtgctgtgttgggtgcttcaaggcaatttcccaaatgtgtctaatcctgagaatcacctggactcttgttacaccaatttttagcagtaggagccatggatctggagacattgagaaattttgtgttaaaagacagaagatatagtagattttttctttgctcttgagcaatttataaactatccttatctttgtaagcctcagttcctttatcgataaagtgtagataataatactttccttgtcaattttcaaggtaaatgaggtaaaaggaaaatgtcctcagagagttactggggcttgtaaaagggttaaagttggtaattttaattgattgtgtgtatgatgagtagtcagatggttttgagaaagaaaggaagttagggcatacaaagaagtttttaaaaataatcatcttctcaaagttgtttcccaactttattatctgggttttatttaataaaagaatttgaaatattccttggtgtgtctgtttttctttgcctattcttctcttgtgccaactcaactattcatctcaaattatatatattaaatcataaacacatgcttctaacagttatattaggcatttatttaacctaaccccttctgtcccagacaagtaccattaatactgccttaaagcaccaagcataccacctggcatttgagtcaagaagcatttgctgaattgactgataaacctctaaatctgaccccatctctttccaatgtactagttgctagacaaccttatgttcggactttcaaggacacttggggaaaactagttcatcattctctttgatatttattgtggaggtttgttttattttttgtgttaacaaaacctcttgtcagaaagatttccttacctcaaccctaaatctcgtattgtattttagcatgcttctgtatttacattgtgggattatttttattaatatacaataaacaagttgtgtttcttggaggtaattactgggaataatttttttctgtgattattagcttctttcagtaactgatttttttttttatccatttagcagcagcaacagaagaaccagaagtgatcccagatcccgccaagcagacagacagagtggtgaaaatagcaggaattagtgctggaattttggtgttcatcctccttctcctagttgtcatattaattgtaaaaaagaggtaaggcctaatattgtcctgtcccgctcacttaccatttatgtcactggttttaaaaacctgtttttctcaagatcctttaaattagaacaaacaacaggaagaaaattttaattttaacaatgttgtcagcacctgagtctattggacatgctttctaataaattcttatttggttatttgcagtttaattttggatataaacatatgctttttgttaagttgacctagaaattaatatccgaatttaaatgtctcaaatgcaaaggtacttgagatcatttatcttatatttgaagtgttattattaacaatggcaaaatatggatttattgtgatacttgggctgtggtctaggaattattttgtgctctttttctgtatttttctacttcttggctacaaataagatatgagaagaatataaacattatttagtaaaattgtacattaaatattcattgactaaaaattttagccttttaaaatagagagtaaattgttttaattgaacattaactttttatactatatcaactaatatcaccatcttctgacgttacttgaagatactgagacctactggaatttaaactgagctttgctctggagaccaaagtatattcctgatgaaaagcatttcaaagtacacagtttttataatatgagctattgtacattatataaaatgccataaatctgtaaggcattgtcttggaaactaatatagcactctaatccttcccatcatgtatttgggttaatgctacaatttggaaggacttttaaaaaaaatatttataagcaaaagtacagtcctaaaatagtttggtgtatagaagtggttgtgatcagtgaattctattgaaaaatataataagtgatgttgcttatattacattaaattatctagtttactattatagttattttatacttgaaataaagcattaacattatagataagactcatactacatgttttaatgattccatcagagtttattttaatatattgcctctttacgattatcccctggagatatatatgttggagaagacacatctgcattagaaacattaggtatgcattatagtgttttgtgttaaattagctacatacgtgctttccccaaatagtgctttctcttgctgttgtctccctctgtggttggaaaatacatcatatgtgaggcaaaagttttaagtattttagcaataaaaatttgccagtaaagatcaataaaaatcaccaaatgtaaccttcagaccttatgtctctgtttagtttaaatttgtatttggagacttaagtaaacaatttagagagtaaagttaactaaacattgcttcacaatgttctggtcacttcagattggatgtaaacatgaaagtggcttctgattatatcctcattcagctagaattgggctaaactattcagttttatttgttatttatttgaaaacattcatttgtcttgataactctccctatccaggcctctgatttagcaataatgaaaaaattgaaaaattaacctcctaaagtatgctaaaaccatcactaagcaagattttgggggaaggtaaaatgctctgacagctctctaaaattgtgtaatatgacaacttgattttctggttcatatattaaatggttaagttaatgagcctctctattaaaatatttaacatttgagctttcataattatgctttgattgtcttttgatagaaagtatgctagggcttttgcttctgttcctcaccatcacctttatacccaggaaaagctgcacttttaaagatagaccaggtttcattatttagatatgttaccttctaatatatagtatttatatctacattacttgaatttcttacttaccaaagcaattttgtaatgacttttactcatatgtagcgtgtcacacatgtaccatgtatgctttaatcacaagtatgtttatcatacatataaaaaagtatagatatagcagcattgcattggatattatcatcaagtatagcttaaaactattaatataaaatgtttcccttttaatatataaatttataataaaaataatggaaaaggaaattactttagcctcttatctacattttagtgggaaattgttaagtttgattttatccctcactgggatgaatacatgtagatatatttcttatgcggaaaacagttccatgtctttttggttgttttgcaaaagaatggtgtataattcaattgagtaaagttttacagctaaggatatgtataaagtaagtttttaggctaagaaaagggatattgcatctttcaaaacgcaatgtcattttttaatttaatcgctattcaattatttccaaatgtatgccattttttcattggttgtgtattatattttacatgcacagcatgaacacattaataactcaaacataaatttgaaattatgtttcaatacagtaaatgtttgtgtatgatatcatgttcacatgcatctactgtagaagtatctgtgtatatatagtatatggtatatatgtatattcacataacatatgtatatacctatgtaccattaagatataataacttgtttgtagaaatttaggtgttattctgtatatatgatatattaacataatagatctttatgttttgtatctaaagaaaaataatctatatagtacacaagttctatgcacagctgttccatctgtcatatttagataatggatgatattatgcttaactgcatgttgaaaatacacaatccatttaatttttcaatattttggcaataagaaataccagcatgttattttttccaaattatgtattttaaattttatttttatattgcatatctgtctgtttaattgcatggcaaaaaaaactaacaatgcatgagcaaattgaaatgcaaagcaaaaaaaacatgaattttattttattttattttattttttaacgcacatttttctgctttattgaatgtgacagagtcacgcttttcattcaccattgcttctctttttccactgtctgtgatttgcttgccaggaggagctactattcttactcctactacctgtaagtagaaaatgggtgatgtacaactttacgtgtgttaaggatgcagtatcccttttcaaaaacaaaacagaatgcttgcaattttggtgacatttcaaaaaaaaagttttttcagactctaaaactataaactttatctatcacctattttgccaatctttttaaaaagggatattgtatttctgtatgtccagctacttttaatttagttataatttccataagtagctttagtctagagccaaaaacataatttatttactaaagttaaacctgtaccttatcttagcaatatggcacttcactcatctggtaaagaagagatagtggttgtaactcacaaatcactatctttatgtagcattgtcatgtctgacaaaatgagccaagtggtgtatttatggaacactcaaaatgcctttacaggatgcaaattagttcaggtctgcatgtgataacatctttctccgtatttctaggaatccaagatgggttatagcttcagaacatctttggtccggccattaaggcaatcattgtgcttttgttaaagaaaaaaaagtagaaaaaccatggtgttgcagcaacaaagaaataaaaattctttttagaggaaaaaaatgagtttattgtaacttaagtaggacaaatgttttctaaaactacagccaaaaaaacctttgtcaactaggaacagatataggcatcacattgctccttttctcttccagagtctgtaactcttccgaaactcaagcatgatatgttcatttggataaggatggagaagatggtccattctatttcctgagtcatttttcagcttatcaccttatatgccagagtagtttttcatccaaatcaaaggaacattacagcaaagcattcttggactttgcttgaccagtatttgatccgccagctttcaaggtttaaagattgaaattaagaatgtttggggcacatatcccacagcatttaaatcactagataaattcaagctagctttacagcaaaacctttataagagtctccattctccatgactataacacaattctgccaacattttaaatattataaacattttgcttcctaaaatctgctaaaccaagtagctgtacactaacagtgctcctaacttattgtgatgaatcataatatccttgttaaattatgtttgatgaagccagagataatcaactgtgccatttcatacaatgatggagcactttccccctttatggcccacccatacatccacctgcagaagtttgtgctgttggctgctttgataatgaaagtcatttgcacatctgtcaaactcaaagtagttgcaaaacgaatttcttaactgttctgaagtgcacattatgtatgctagttactcaggaggagacaaagcatcaaacatactggaatcactaagtatttaattatgagactgtcaataagcttaacattaaccattgatgtagctctgatgttaaaatgagattcccttttttggtggatagacaacatttctgtgttccagacaacgtaacaggttatactaatattattatagtacatggggctactggtaattttaatcataactacagatattatcacagagatatgcttttaaaggctgcttaaccatacctagtgatgcttatctggattagaggggtttttaaagataaaaatagatataaattagagaagagcttaaaagaaaaccagatgtgatctttgagctaatattcattgacattgtcatagttactatctgtttttgatcaaaacacttaacactgatgtcaatttttctttgttttagaagaacttgaatgaaagcctacctcacagggttgttgtgaggattgaggtataaaaaccaaggtgataattcatggctggcagatatttacaaaggtcatatttccccataatttgtcaactaatctaggtttgtgaatctgaaaagttaaagtccttcattgcatgaaaattttaacctgtcatgcatttgacaaattcattacttattgtttttctccaatcatgaactacatataaattatacatattttaaagtaaagcctcagggtttaaatttttcttttctattggctttgaactgctcatcttcaaaattttaacattgttctgaatccaaatttcagtttgtgctatttttattcaattcagtctctcatattttttgagaaatgaatttattcttcttatcccagaaacaaagattgaaagttatttcctaaagcaatttttgctgttttaaaatttacaaatggcaaaatatttattctatatattttgctgaaatttgtaacgactagtgttcaactgctagagtaaatactggtgtatattaactagtgttcaactgctagagtaagtagtgccactttgaaatgtgtcaatttaaaaagtgtaagcaaccagatacagcgtaagagcttagcctttagaaccaggtcattcttcattgcttattagataaataaccttgggccagttatttaactcccctgagcctcattgaacttatctatacaattagaatccttgtgcctttttcagcagattgatctgagaattgagttaacaaatgaaaagtgccaagtatataacaggcctaattcatctattcaacaagtatttattgaagcctgctatgtgccagacactgcgtcaagtgccaaggctatgcagatcatccttctctttgtggagcacatagtggggaaaacaattgaaagatatttgcacctatcaatcaataacactcattacaggggaagaatgtggtagtatagaaaatacctagcctaatttgagaaaggttgctttggagtcaggcatataaaccctccctgacgaagtatctattacactgagacagaacagacagattttagccagatattacaggcaaaaaaatgttgcaggttgaagaacaaacatcttgtatgatggcctagtgggaagtttggaaagtgaaagtccataggctaaatgtgaccttatgatgtttcatgtggcccatacactgtttcaaaaaataaaatcacttgaagaaaatcaagaaaattaacatcaatcagattcatggcttgtctttaaaaaaaaaaaattaagccagagagaagttcaacagtgggatcaaatgcccctaggcaagttgcccctaaactgctttccagttcttcacagccattacccttccttatggtatcttgccactgacagcagcactcatttatattacctgtctgaacctacatattcataaaggattttgaccctcaagtctagaaaaagattaatagctctttgaatgtatagcacaaatgttgctaataaatgatggtggtgatggtgtagtggtagttatgttggtggtggtaatagttcttgttacactttgtcattgttttcttattactaatactgtgattctgtgattatcattatttattatttctaaaatagccatctgcatcctcgaatcttagcttatgactatcttaaacaacatagtgtcagatctgctgtgtacatgtgtcgtgtgtgttgtgtatgtaccgccctgaggccaagtactgtaattctcagagaaaatatatcctacactggagcagtcctccaattgctagattaaggttgtaaaggaaaagcctttatacataaactcaatcttttaaatgagcctttgtagtatttgtagtacatttactctggtttggatattaatgaggatcagaaaagaatggcttagcttataatctagtgaaggtaatggtgttcttaaaacaactaaagatttccaaggcaatatgaattgcagccataaacttagtaacataatttgcctattacaagcttttagagtgcctttatttatacataaattttcttgttagtgtgatttaaatattttatgtgcctttaatagccctttttcttggatgttacatgtgtaacattcacaagaactaaaatatattttacatccatgatatgtaagataaacatgccaatatttgagtagttcataattctaatgctgttaatagccaatcccttaaatcatatgcctttctgcatttataaagcattgctgtagttagttgatagtatgccatgtggttctaattagaaaacacatttttaatatttgaccatgtgaatattccaagatgataattttcatgtctttccataccatattttaaaactttcctcactacttttcttacacagtatatgatttaatcccatatattcatgtgtacttgaaattttctagcagtggcttattctaaaagtcttcagattagcttctgattaatgttataaatatattgctaaatatgttaatgctacacattgcatttttacttaataatagcacagagaatgaagaatgggacatgtctttgtctgttttaatttggtggctacagtaaaacagacttgaaaagttagtcatgttatttctaaaaggaactaaaagttgatcaaaagaattaattacccaggagtatcaaaacttggctttagcttgaatatttattgaattactctagtaaggaggtatttattttgcttttaataaatataattatattttatgatatttaagagaacaggaaatgatgagagatttggattgacagcttgaatattgaaatatgcatctgacaaaatacttttatagcaaggagcaaatataattgtttgaatgtcaaacttaattcctgaaattgtgaccagtgcttggggtttctaaaccatgtttgtaacattatcctcgggctcacctggactatttattgctggtgttaactctcctgcaagcctcaaacactaaggatgcccttttgtatttgccttggcagcaaacttgctaaaaaacgcaaagatgccatggggaatacccggcaggagatgactcacatggtgaatgcaatggatcgaagttatgctgatcagagcactctgcatgcagaagatcctctttccatcaccttcatggaccaacataactttagtccaagatgtaagtttttcattaaaattttaataaatgatgttacaactcatttcactttgaattctacacgataccttttgagtaatgagagagagtaggaaagtgaggggagaagcagctagaaagaagagaaagagatggagaatattatggaatttacaagaaggattctcatcaagattgatactggatttagtttaacttcaaactctatgaattttattactgtatcacaagggatattccaaacatataccactcagtccatagcacgtgtcattgctttaagtggaaatacacgattgcctacaaaaagttagttcatgtcagaatttataattctttttccatttgcatcttcctttgtgtaagatgaaagtctcttttgcgataagaggaaacagtaattctttttgggaattattgacataggtaaaatcattgcattaaagtagtatattgtagactcctggaaaattgcaatactaaaaagttaactcagggaaacattagtctacatgctcttaagtatctggtgtgaagtccaaaagtatacttgaattgggggttttgcaaggcatagtgaaattcatccatccatctgtcttgaaaattcctaatgttggtctatgaaggcaaggcttttaaaatatttccactgaagtaccatttaaaagcagatgattttaataattaccccagaatcaatattactgtttattttcaaatttcatatgaatgttatattctgttctatagtgcatctgtttaagttaattaaatttaagtgaaattgcctaactttgtttcttcaaatcctcaagtaaaactgatgcttgaggcaggcaaatcaggtatatctcttgagtatactggccttgtataacttgggccttatggcatttggctcagatcgcagagatatgctcaccccggtttggaaaacatgggtataagcaaagaaacaatataagtattatctcctgtacaaactatgaacatatgtaatagtaagattgaaaacaaagtatttgtaggttgtatgcttgtatgtaaagagggaagtttttttctgaattgttcagcttggagaaatttttcagtaactattggatctaaaatgaagcccatcattttctatgtatatatgtataccaaattagtagttaaggatgctatacatgagtcattttggaatttagttataatcatgacagggcctttcagatctattttatttttatttcactatagataaatgatagagaaaaatgtaaaatactattactgttgaaagtaagttttgcggaaaataaagatgtatcatctctttaactacttaatttaatatttaatcaattaaggttttgaaagcattcatgcctcccaaacttgtctatctattgcctaccttagggccttatttgaaagtttgaattcagcagtgtaactataaatatccacttatgaacttagagaaaggattaaatctatttcccacagataactgaaaaaaattatttggaatgaatatgagataattatttctttaaataccttacacttgatagatctaaaatacatgggtttttttttctttaattttttaatgtcaagtttaatcttctggctttttaaattaaacagagttctgaaccataattatagatacacctctcttgatgtttagatataacccaagctgagagagaaaattttacatttgcagaatacagtaatctgagaaagtttaataattatatttcttaagaaagcataaatctattttaaagaaaaaagattttaaaaaacaattttagagcaatatattccttcatgagctttgttttcctgcagtgcccaatgatccacttgtaccgactgctgtgttaggtgaggccctaaatctttatcatcttttcattgcatggatcacacctccttgcatgggtttgcccacatagagattatttacagtgcaggaggcagcttggttttgaaaatagacagccatggtattatcaaagagagcaactgtgttcaacccaatatcagatctagtggatttcaaattagcaaggcatgctatttaatgtattcttcaattcttggttgttagatttggagcaaaagtacatggcccttaatgtctgactaatattaatgtgtcaaaattagtagaatgaagccaaatgcatacatctgagggtgcaatgttgcctgaataactagtttatatgtaaaagtctacctaatggaaagggatgtttctaaatcctcccaatttataaccacgaaagaacaaatttacaagtaaatattaggattatgtgcatttgctctagcttttgtctttattaagaatgttttaatgtaggtaaagttgctaaaatcttgatgtggggtttgacattctacatgaaccttacctgataagtaatgttatctttcaagaaatttagaacaagctacttgggttaccactgtataacatctaagacaatgctattactaatgacaattaacgcttttacagatgtaaaattatattaatttttaaacctacctatatatttaagaatggaatgggtttcatttttcatttcactttgtaccctgttccttgactaattatacaccaatgattagtaatcagcttgcctgtatgtttacaggttccatatcaattttaccagcgtttctagttaagctttaaccaaagaaatatggaaactatcaaataaatatatcttgtaaattcccaaatgtcatgtttgttatttatatttaacatttcttgtgaacaaaaaactttaacttatattttatgcttgtatttttgttatacatacaatcaatgttcaattgcatttttaaaatattttggaacaacacaactaactcagttatgtaaaatatacctcttatttactaaaataaatatttaaaattataattttataattactataaaggatatatattctaaaataatctgaaaagtcaatgttcttcatctctacttgcactctccctttgatgtccaccaataatggttaggaagtgaactggggatttgccccagggagtggtcttatcacacagggaggagccataaatcatgatcactggggatcattaaggatacatcagatgcctctgaaaatgtcatcttctgctaagcactgtagaatgctgtcagtataaagttaataaataaatttcaattaaaatattgagaactaattggaaaaaaattagttgcctaaatgttaaaagtttccttacaataattttctacacatatgtaaagtccaagtctcggtcctcctgtggatttacaatatgaactcataaaaataccttacatctttgttttcccatctataaaacagtataataattcctaccatacctttttcatggggttttattataaagagaaaattagatgatgtgtatgagttttataaactgtaataattatcatagtaattttccctgtgaaaaaggatattcatgtttaaggaaagctagatttaacacaatagagtcataaagtctagttatataaacattcattacacattttatttaattttgaaagtcaagctggttttaaaaatatattggcattctttaaaagctaaatatctcattaatcatattagatgtagaaatgatttgttgtatttttcatcattcttaggattgtggtctttagagttttgcatccaatcatttttgtatttataatgcagtttctgaaatcacttcaaatattgcttaatgctaatacttactgatttaaaagggcttagaaacttttcatactgattcgtatttttggtttttgtgttttactgcttcattgggtttaagttcctataacaggtaagtgtattgcaaagaactctagaaaacctttcaatcaaggatatatttcaagttattattcttaaatgtataataaggataatgattagtacgtgtaccctcactactagtcacattattaggtggtttaatgaggtggaaatgtattgagattaataatgcatatgtgattattttaaagaccttactgctcattgtactactgtattaaagcttaatgcaaaacaaaaggcactgtctattttatattgggacacaatcatctgtaagatttggaatatgggtgaattctgtgtttctcactgagcctttttcaattgtaaatattctgctactccagcaggtaaaagtgagctctggggctgctccactgagccctggctaccttcttccagcttgagtgattgcattttgcctctctgacgttatctgttctctttacttctcatccttaactgtatattctgtggcagtgcccaaatcaattgcttctgaatttaatttttctggggagatgtatttattctttatgtcggtctgttgattgtaatattttaatagaagtagatccattgactttggtcgcatagtgagaacaggaaactctcatgaatcatgtttgttagccaatgtttttgtgtagaggggtgggcaaaatctgagtaaaagacatgaattcacttgagtggttaggtcacaacagaatctatcagggattttttgattcagtgtatttttaggaatgaatgctacaaaaagagcattcagcttaataagagggagtaaagataaatgcaatcaagctaaattacagaggcacacaaatctgattgtagggttcttttttttttcccttctccaggaagaaaaaatgtttatcatggggacaacaattcattttttgctatatcctatttgtagagttggtgatagaacaggcaaatgtactagcacttgaaatatgtttatctgttaattaaatatcattctctacagtatgcattatcattaaaaaaaaaagttcccctaagagtgtattttctcttctgttaatgagtatgacggtataatgcttttcaaagtaacaccccttaaaacatttgtttttttttttaagtggtaagtttaaatgtgataaatatgagcatgcttctcgttgtaatgtttagtacttcggtcattaaagtactgtttattcttcataggcaaaaatgttcttgttcttttcttccttcttatgacagaaaaagaatttaaagtttcttttctttttaagctaataacacaattgggaagggacttacgcttaattgtgagtggtcagggattcagttgactttttaattcattcattggaatatttattgagttactgttatgcatcaggcactaggaatagaaagaaaaatattctgtctctgtactgtgtgttcagaatttagtgaggaaaatagccaagtagataaatcattaaaatatagagcaagtgaaatgacatgtaaaaatgaataagaggtcatgggaacataaagaaggagctttgtaactcaacctggaggggccagaaaagacttccaggggaggaacccacattttgctccagaagcgcgccctgatttctctcgcagcgtggccaagagactcaaaatacatttgcaataaaaacaataacagtaataagtcaaggcggcagaggttgaatataaatgcacgtgtagtctggctagcagacagagtggcatcagggggtgatcatgtggaatgcccatgtttcccagtgcagagtgtgttgtggtaaaaagccccagagaatagggccacgagaacaagaagagcagccctttggggatgggtcacctagatcgggtatctctgagggaggttgggatatggttgggaaggagtttggtcgacttaatagaccatgaaaacacctccacttgacagctgggtcctctggtcccactctatactgctatgactacagatgcaagaaaaacaactcagcaaaatttcccgcttaagcttttaaaaggtctatcagatgtctccctgcatctcacagtgtctgttgtcttgctgatatacacataatatactctcacctgaaaccttgagttttgtctttggggatactgtctaggcctatactgtatgatatttctttcccagaattcctcttgttatcagaaagatcttaaggtcttaaaatcttcattgcatagatacatatattaaacaagataactttgtctcttttttaatcttctgaaatctgaaaaatgccagatgagaaccacagtgctacagcagagtccagtcgccttctagacgtacctcgctacctctgtgaggggacggaatccccttaccagacaggacagctgcatccagccatcagggtagctgatttactgcagcacattaatctcatgaagacatcagacagctatgggttcaaagaggaatatgaggtgaataagttttgatactgtattgaatttgatttttaactatgatactcagtggaatttagcatttttttccctctctttaacacaacaaggaggggattgttctataggctctctaatctagtgtttatgagtgtacaaccaagtgtgtgtacctgggaatgggaagggaatggggaaaaaagcacttcccagagatatatgagtctaaatttattacaagaatctttaatgttggattccgtaatttattttactatggtattaaaaaaaaacactttgcgtatctccccatgcaaaaatcaagtagcaatacactttgggtcccattgttccattgcagattctatcatttgaatgaatcaagtagcaggtacttctctgcccctttttttgttgaccttatggttgagaaatcagatgaagctttgtgctctaaatatactacttgccactctcagtttaattttatggattattggttgagggtggctgagaaaaaaaatagagcactgcaaatctagtaaacaacactgagaagccaaaagaaggcagtgggaaattcttcttccaaccttatttccccttcctactcaaaccaaaataccaggacttatctcacaaaggcaatgatttaaaaccaaacattccaacaaacataatatagcaaaaggaaaatagttcctttgccacccttcacttactgagaaataccaatctggggcatggaaggaagccagtccactacccatgaacacatcacagtatgcacacatttaaagtgaaagaatccaagtaatattttgctttgaaaaggccatccaaaatacatccaatttcatgaagaatcttttaaactccatattttatctatggattacctgtataccttaaattaggagtgttaattatctctgaattttgaaagttgattttagatatatgccagaaacactgccgtggtaacaaaataagtacaaggaattagactattctgccagagctggttctttttgttcatttcatgtgtactcctgtgtaccttgcttcaaagaccactgggctctttgaagaccccgtttcctgtgttgagcaaagtttaagttcttttgcaaaatgaaatttacacccgttttaaattgctgcatatagtaattaaactagtcaacaaattcttctgttcccagattcttgaagaaggggactctattttaatttttatatggtcccttgttgtgaagactcactctttttcatgatcttcaaagaaactcagatgcgatgtattgcacacaatttaatgaataattatggagggaagcaggttttctttctactgttataaatgctaaatgatgcacacttgaaagatactcattaaaagcttttttgcagttttgatgcattatcattcaatacgttttgaaaagaatgatactttgctacttctacttctcattatagtgatcttaattttaaaatactttcaaggtccattttttttctctaaagttatttttttgtctttaatttgacctgaatccaatttaagatgaacaagtatgaatccaacaaagcggctttgaggtctgagaatgaaacttgtttactactgtaggactgctttcctctctgagaaagtggtttttactatttggggcttcagaacagataaacctgatttttaaaaaggaattaaattcagtctgcttattcgttttgttttcccagagcttttttgaaggacagtcagcatcttgggatgtagctaaaaaagatcaaaatagagcaaaaaaccgatatggaaacattatagcatgtaagttcccattcaattcttggtgaatgtaaatattatatgcttatatggttttaaactttaagaaaaatcccagagagtggtgtgtctgtttatgaagtaatctatttaatattaaaacagcatttacaatcaggcttgagggctcatgcctgtaatcccagcactttgggaggccaaggcaggtggatcacctgaggtcaggaggttgagaccagcctggccaacatggcaaaactctatttctactaaaaatacaaaaatcagctggcttggtggcacgcacctgtaatcctggctaatcaggatgctaaggaaagagaattgcttgaacccaggaggttgaggttgcagtgagcagagactgcattactgcactccagcctgggcgacaaagcgagactctgtctcaaaaaacaacaacaacaaacaaaaacaacattggctattagcagtgattctgaaattgtcatcatcctcattaattaaattgactcagccacttcaccctgtggagataacttgctgtttgatttcatgtttgtacataaatgcatggggtattactgaacagctgagactatcaggataatgaaaaagtaagatcttttcagttataaattgttttaacacttccatcaaacatattcaagattggggtgttattctttccacgtgcctttaattcttacttggagccactgtctaaactccagttgttcgatattatttatcgttagggacttcctcctgagtaagtcctcaagatatacacgggataataaagtcattatcagacaaaaccacaggatcagtaaagaaagtagcagatagtttaacttgtaactagctgctgatttacctagaccactctgctctgaatttaaattattttaaagtatcttatgaatagctcaaaatctaaccttgattctcagggagtaagaaactgagagcgggaattcaaaattcactttttaattctgtggctcatttgctgtaaagtgcagaagaaaaggatccaacccgtttaaagtcatgactaaaaagcaaaattagaagttaagtctagttcagttatgtagacaattctatgactcaaatgattacttaccagacaatttcatgtctcctaaacactaactatgaaggttcaagtcagtgaagcttaagtcacacaatattataagtgtaatagcaaggttcactaacattcttatatttcttcaaaggactgatttggtagtagtatactatggatagactatgggcaaccactgaattctttagtctctaccaatgacattgtctcagaacagggggaaaatttaacagcttatatttattattttaaaattttagatgatcactccagagtgattttgcaacccgtagaggatgatccttcctcagattatattaatgccaactatattgatgtaagtatttttatagttaagtatgtctactttattggcttatatatatgaacctttttgcttattacctataaagtgattgctagctttttaaaatataaaagtacaaactgtacacttttccttgttctgcgtcctagtacttactgacattgttgtgctttctttcacacctgactttggtttgggctgtagatttggctgtacagggatgtaagtaccactatatgtaaataacagcaccctattataaatacaaacattcttaattacagttattactaacgctctgttactactagttatttctgcatgcttcacctaattagcttcatacaatatatctctgttcgtttttttgtaattctttcacatgcataaagatctattttaccaccttcccttttcttgtgtagaaaaacaggaccatttttagctttgacagtttattatgtactcgagttttatttgttgatgatttctgtttctggcttttattcttacccttccctaaacatatgtgagaagctggatagtatgatgtgtattagtgttactgaaattttactttttacatttgacttctgacgttaaaatgagtagggagactattttgtgatgtgttgtattggcttttaaagtaataaaattactcaggcaaaataattactaaatttcaattgtaaaatacacatatcacacatatatatcgaatcacagaaatgaaaaaggttgctttgatcatatatttcactgttaaattttgattacatacatatctacatggaaattctttatttaaaggaagtaattatcaaacaaaatatagaatattcttaaagggcaatatattacattacctataaggaagacctggttcataatcaccctggagatcttgggaatgttacttctctctctgtacctcagtttccttatctttgcagtggggataataataacagtactaacctcatcactttgttgtgagaattcaatgaagtaatgcatgttgagcattttgcccaatgcctagcatatatttagcactctttaaacttcaactattttttttacaattaaaatctaggtgtgctataattaaattgattcacaatatgtataattataagacaaaaggtggaggtattaagaatggtagcatatgtatacttctatagacctaaaaggtatgaaacctaggacccaacattttataatttccataaataggaaataattttcattacatttattaggttcacattttagagttatgaattgtcattatgtatttagttgaactaatatattttataaagcatagtatatgagtatatgagttcaatttctgatcataatcttactcttattcattatataaatttatcaaacatcattatgtaaaactaagctaatggtctaatttttagaataaaaaaatcaacagttctatgacaaatttgtaattgttcttacctatttagtttaacctgggttttctgccaggacttgtacactggagccttgttataaaattatttcatggttcatatggtaggactgtattttaaataagacttgttatctagtctttctgttaagaccccagtgtattttggtctatttctatacaatttcataattttccctctcccattagttcattatatgtaaacgatatgagtatatacttctgcaattggtattttttttaagaagtggaaatgaaatacttataaagcttggaaaaatttttccataaaacattgtgctattttccataaaacattgtggtatattaaaaatttgaaatcttccaaatttgcaataacgtaatactcatgctattaaattttaggttggagatctcagttcacatgtatttatatgtgtattgagttgcccacaccagtatgtggacaaattgtaccacagacttttactaaggctcattggtaaatatgcaacaaattcagaacttaggatcatatcatcaacatttttacaacttatgctttgttgttattcaaaccaattgaaagcaactaaaaatctattcctcctcaacagaacttttagcacactgaaaaaaaaaatactaaatttttgctcaagataagatgcatttttaaaaattcttctttccctatatatatgtgtgtatctataattatgtgtgtgtaaattaacattgtgagcacgcacaaaatagtttttgcatatccctgaatgtgttgtagaacaggaatattctctaaaaatctcagcaggactttgattggatgcacacatgcattgtccagctctaacattggaatgttctgttatttttttatggttctaatatgtcctcgtccatttgtaatgcagtgtgttgtacttttggatgataaaatgagaattaatatttttaaacactattttaccaggaatgaatgactaaacatttacatgaaggcataaacattttagtgaaaccaaacaaaatctatgaggttattccatggcaaacaaaaatcaattatacaatatatattctaatcagagcctttaaaatatttaatttttgttttatgtttacctttcagataacataggtttgagaagtgaactatgtgttcactactcatttctggactttttattataacttaatcttaacaggtggttgtcttcatctttttatgccttcattcatttatttctgatattgatgtaaaatgataactaatttgttctcttattttagggctaccagagaccaagtcattacattgcaacccaaggtaaaactttgccttgttaaatgttatagaaaaaacaaacttgcttattcatctatgtggtggtttttattattttttaaattttatcttagtaacaaaaaaatcagcccttctgattaacactgctccttactcatttgtatagtacaaatttattgtgtgtgtaaagcttatataaatttaagcttgatttacttttaattaaaagtgaaagaaaagctggtagtggttattatgatttgatccttgttacacagataggtcagagcactagtcaatagtgccagtcagaggaattactcatttttgaggaaaggaaaaagaagtctcatataagaggcctgtcttcttgcagcaagtttgttagtagtacccaagaccaatattgttataatgagctgttatactgagcaattttttgacgagtcaagactgagacaaaacaaagagatggaatttagtcaagttaattcttcatggaatataataagacagtagagagatcttgttatagtggtacactggggagtaaaagtatccaaataacaacaacaaaaaaagcatctgtagttatctctctaaattgactactggccctcagaagagaaacctgtacatcttttttatataaaaggaaagtaaaacaaaagctaggtttactcttttaacaggggtcatttttctgtgttttcacatatctttggagtaattgagttcagttgtgtactctttaaagttagaaagatcgaccatagtggtgaacaatattcagttttatggtattcggtagagaacagcccagcacatgcttttgcagtttggagatattatgataagattaggatatgtccttacgtgtaaggatatgtttttattgatccctaaacatgcactatttataaatagtgggcacttatttaattggtaatatatgctgtctggttgatggtggtataagagttctattttttacacatatttgaagatgcattaaagtgacttagtgacaaatataaatacccaagaaactagtgatagtttcttctaaattgggaagtgtagagggcaaattgaaaaaaaaaaaaaaaaaacttgtatatgcctgtgtttttgcctattgtgggaatttagatatgaactgaatttaagtattttcagtgacattttgtgttagaccttttttggaattacttagtttactctgcttcttatcttagctaaacttcttactaactacaaaattcctttgataacataatattcaaattaatttctttgtaggtcccgttcatgaaacagtgtatgatttctggaggatgatttggcaagaacaatctgcttgcattgtgatggttacaaatttagttgaggttggccgggtaagaggaagaaaaagaatttttttgtcataaaaatgaacatagttgagaagcaacatgtaagacactcaaaatagaatatcatccaattgtttaaaaaaaattataggcacaacattttagttgagtacttctaagtagaccttgactggctgaaaaattatttgatttctcattgagtaataaaataagctttaattttgtactggaatctaactgcattatcaggcttgtatattttttgtgagactatataaactctgtttattgtataatagatttttttctcatttatagatttttaaactgagttttaattgtgacctaaggagttattgctggaattaaatcaccttggctaattagtattatatattcaggtctgtctatatattctttttgtcacttaggttaaatgctataaatattggcctgatgatactgaagtttatggtgacttcaaagtaacgtgtgtagaaatggaaccacttgctgaatatgtagttaggacattcaccctggaaagggtaagtactctaaaattctattttaaaaagtgatatcaaaactgctttttctcttaaaatctttgccaagttctgttttgatgatgctataaaatccattcattcatgtattcattccacaaatgtttatttgagagtttactatgtgccagacatgtttctaaaccttgggacacatgttaaaatcgcctcgtgtggatcttagagccgattgaattaagacagcaataaaaataaataaatcaactaatatatcatacatcatgacaagtgatatagagaaaaataatgttggggaaggaagtagggaatattatttaggcagggtaagaaatggtttacaattctgaaaggatgatcaaagaaaaactcattgttgagaaagtaatatgagtagagacctgaaataagtgagggagtgacgggttatgtccagggcaataatgtttctgacagaggggagagtcatttcagaagcctagaggcatgtgtaaagctgttagaatgccagacagtcaccaggccaagatgtgcagatatccataagtgaaggggaaagaaatacaaaatgaaggcagagaaatcacaaaattggataagtggtgccttgtaggccatgatgattttagttcatactaaaattgagttaggctgccattgtagggtttgtgagctcagggataacatggtctgaattttatttctaaaaggatcactccaagtgttacattgcaaagaataacgtaaggtggctggtgtagtagactaaagtgaaatatagtaacagtgaaatacattttgtggtaaagcttggtagatttgaccacacaaaattgtgaaattacctgtggcacaaaaaaatatcaaaggtacatacagacagaagaaccttgcgattgtttattaatgtccttaatttataatgttaataccagtagaagaaaaaaaaaaaaactagaatctctgaagaaacacaattgttaacaagcctattaaaaatgtttaacctagtgtacttatataccattttgtccttccaaatcagcaagaactttaaaaaagaataatcctcattgattgttagagtatgttgaaacatatttttatacattactgatcatagttaaatcgctacaaaccttctttaaatcaataaaacagtatatctccagagctttaaaatgtttatgtcctttgagaagttaactttcatgaatctctcctaaggaatttatttaaaatacaatgacttcatttatagtattaaaaacttatagataaccataaatgcccaacaatagagaaataattgcatagtattttataaaaatacttgtgagttatcctaccaacatgaaaaaattaggcaaaatattaagttgaaatagcattatacagaacaacataatcatgattattgtaactgtaaaatatgtatgaaaatttcttagacaaatcaagtagaataaaataagcaattgatatgggagatttcagaaagaaccattaagcttgatttaatgaataactagctcatattattaaaaaagaaatgtggaatatgcagtctcttaagttcatacaagtcttgtaaaaatcaatgatgaacttagtaataaggaaaacctgaatacataacaaaaagttgagatattgccaaaatccaatagaaagcaatgatgacaaactgctgaccagtgaccccagaaattagcctattagaagtcaccaaatcctcttctgaataatccttgaatgatttcctcaaaactaaaattatattatatagatcaatagttttacatcaaaatttacctcattattctgtaagaaaaatttatactcataagtgatttctgttttgaaatgtgctctgaaatcatgtgaaaaattataacattggaaaatcagaaaaagtagaatagaacaaaggaaaaattaaatataaaaaagaaacaaatgagaaaaaagaaaaagcttgtttattgaaaagatcaataaagtaattaaaccactattaattctaaatgaggtacaatgaaaatatacaatattagaaaacacagagggacatagccattatacttgctattagaaaagctatggaaaatattatgtataaacttaaaaatataacttttagtccaggacacggattttctgacaaatgctgattctcaaaaattaggtcacaaagatttagaagcatgaatagatggtagaagaaaataggatgattgttattatcattaaaattgcactatggttttaaagttaaagttcctttatactttaaggaatagctaatatctatgttttaaaagttagcataatgtacttggaaggctgaggcaagagaatcatccgagttgggaaagcagaggttgcagtgagccaagatggcgccactgcactccagcctgggcgacagagggagacactgtctcaaaaaaaaaaaaaaaaaaaaaggttagcataatgatgataacagaatcagataaagatagcattctctggagctctcattccctctttcattatgtctttcttctctctcttcctctcttccccctcttcctctcttccccctcttcctctcttccccatgcacacacatattgcagaccaatttcattcaagaacatgaaaaaattcaaaataagatattgaaaatttggatctagtagtgaattaagaaaatatcactacatgacctattattttttccctaagaatgcaagaatatttcaactgtagtgggaaatcttaacaggatatttcattatgtcagtacattaaagtaccaaaactgtatgactttaatagattaatgcatttaattttattttcaaaatatttatagtaatactctaattagggaaattaagaggcatcctaaacatgataaaggtgattcaacaatacctagtagcagccatgttaaggaatgaagaactaacgactattcatttatcataaaaaactagtataaagattatattactgcttctacaatcatgaatgttacgtggataatcagtgtcactaatattaaacatttttggaagttttagcaaatgaaataaggcagcaagaggaataaactgtgtaactactagaaaagacaaattattttaagatgaaaggatttataccaagaaaagtatggataatatttttaaatgggatgtataaacatttatttaaatgaccaaatctgcataaatattcatgagttatagcttgtctttatattagtgataaacagaagtaagaaaatattactaaataatctttaaaaatacaaagtgccaaaatatctcagaatatatttaataagaacgatatagttcctgatttaataaaaacacaaaagtgtacttacggatacgcataatatgtgaatgagtggagacatgcaccatgttccagaatatgggagtacttgatattaatatcactgtatggatttaatacaatcctatttggaaaatcattggattttttttttcttgttatttagaacaagaaaatggggggggttgtttttttaaccacatatttgaaaatcattcagaaaaattaaaaaaaaaatcagggaataggtgctgacatatgaaaatgtactaaaaagagcaaaccctatacatgtaatagaaagataaagggagcaaggcctattaagcaactccaataaaagaattaatatagaaggagtaaagtattacctaaaatcaggccatgaaacaatttttgaccttcctcactagagttgaaaagtagcaaaaggtgattttccattggggtgattccatggtgatgcttatcattgtgattgttacagttatttattgatgatccctgctttgtgtagggtattgtgctaggaattggaattaagaaaacctttaagaaatgatcactaacttccaaggttttggtggtattggtttgtataagattgaatctaaagataaactgtttttctcagttttgtttatttcatgtaatgtgtctaccttttctgattgaacaagtgagattgatagttcacagatagttcacagtagaatttgaattatatagattatagtgggattttttttccttttgctacaaatgtgagttcttaaaaataaattcggcaatatttcatctataccttccaagctgtgctacctcagtctacagacttcttctaaaaaaaggaaggaaaaagctttgaaatgtgcatttacagggttctcttaaattaacccaataggagagcagcacaacagcagatgcttcacttctttcattttgtatttttgttactataaataatactgcgctgaattatttcacagagctaagaaaaatagtttgcccaaagaacagtttagctgcctgtatattttcacaagccaatctagagcagcactgtcctggaaaatccctacatgctatgcttcaaaaccattttcaacatggataagcaaggcattaaaatctctttgtgaggtgagaagctggaaagttgcttttatacaccacttgagaactcaatgcattgggtcaatggggcagcattttagctttcccatttccttcttttcccctaataatttaatgtgttgtcactcccagcaagaaacaagctgtcaaagtaaataaaatttacccagacttttagaactgagcaagacttataattttctttctttggcagttgtctgacaataaaggtaagctcctagtccatgttaggccttcattttattatatttttttttttaagaaaaggcatagtctttcgtaaaggttttattgttatcattgtcagttgggtctgtacccataattgtgtttaatggctttattttggccattaaaatggcttttgaaaacatttctttccatctttgcacagagggggtacaatgaaatccgtgaagttaaacagttccatttcacgggctggcctgaccatggagtgccctaccatgctacagggctgctttcctttatccggcgagtcaagttatcaaaccctcccagtgctggccccatcgttgtacattgcaggtaagtggtggtccaaatggtattgactgtatgcaatcagctttttttagagtatcaagacaaggcttttgagcacaaaaactaatgtgtgcttacgaagttccagcttgcttgtattatagataaagtaaaacagcaataaaataaaagttggctgtaagtagtctataaaacaggaacttaagaaatacatacattcatcctaatgcgtgtagtgttatccacaatttaaagtatagaaactctgccttttaatggcaacatctgtgttttttgtttttatcacttttgcaaatcccatattgtatagaatgctaggttgaaatagacatttcttgccaatctagaaaattcccaatagaattccagctttaaaactaaatttcagacatacagagttactaaatggcctaaattgcaaggatttgtgctgcaaaacagctatttaaaaattttttttaaagaattcacattagaggaccttgaaaactgcatcagtgagattcagcaaatatatgccaaaaaacacgagcattatatccagactttcttctgattagaaacttctcttaaaacaagcatttagagatactaaaagcaaattacatggcctcattttgaggtgtgaccagaaaaataagtactgaatctgaaaagcgtttcctaaatgatgctgcacaccattctcatacgctcttccctccaagctacataataggttgtacctaagcattttttgctttctgaaaatccaacctattcaggatttaaataaccatgtataaaagaggggaaaaaaagcagagaatgaagtaaaggtaaaacgtcccataggatcagatactatgtaccctgaaaacaaaaaaaacttcctttcaatcctcctcatgaaatctgatgtactcttaaattacattcctgtctccaactctgggaacagtgattgagaagatggtaggggacaaagataaatagagatagccacaatatcttttgcttaaatttctaaaagaacagtgagtttaagagaagtgaccaaatctgaataacaaggaaataatgttactagcctatctaagcacttagaaaatgagataaataggttttcaacttaagaatttcttgatttatcagagaggtttactttcttatgaattgcttgcttcagaaatgctccaagattctcagatactctcttgaaacagaagtgtcattttccacctacactgaagcatctctggactacaaagtgaattccccactccccgcaaaaaatccttattttgttttccccattgacttctatatataaaattggagaaacattccccagctgcaaaataatcacagtatattacaattaaaggacacaaaatatggtgagatagaggaatacattttagtgttctgtaccactgtaggatgagtctggtaaatgataatgtttagtttgagagagctagaaggaagatactgaatgttcacaacataaatgatacatgtttgagaggacgcatatgccaatcacccttttctgatcactctacattatgtgtattaaaatatcactatgtacccaagaatatatacattattatttgccaattaaagactaaaatataattttttaaaagtatttttaaaaattaactttagaattaaatacagtaagatagcggctagccttttgatttgctgggaatcatattctacacctaataattcattttcatttctcttcagatcatgattcaaatagtctttacactgttactctcctcccctttgataaccgtcattctcttgcccacccccaccatttgcatttcctgtgaagcgtggctcctcagatttcccgtttaaagttttgggaattaattttcttttgccttggtatttacaagaggtgaagacagtgagtgagccaacattctcacattgttgccagaggacacacaactagatgaatctaaaaatattcaatcttgagttaaattttgaagcgtgaatctgccacttgatcaattctatgaacttgaaattatgtgtattaaatttacataaaatgaaaattgtgagagaggtgtggaacttaaacagtgttattttcaatttgaaaataatttagaactcttgttccaatctttagtttataccaaagcagatactctgcatgaagctatttgtacattaataagcttttacacagcagggacaagtgctgtgccttgcagtttgttaaatcaatttgattctacctatctgacagtggaaaaagtccttatttaaggttatgaagactaacatccttcttacaattcattaaatttaattgtttttcagtgctggtgctggacgaactggctgctacattgtgattgacatcatgctagacatggctgaaagagagggtgttgttgatatttacaattgtgtcaaagccttaagatctcggcgtattaatatggtccagacagaggtatgtagatttacctgtagtggactttgtttttattttttattttttttgcaaacaaagagtagatgtctctcatatatactctactcaaccgaaagagatgtttttcatgtgtaatcaatattagctgagtcatatagaaaaatattggtgttttaattcatatttccatatagagaaaattttctgtatttcctaactttgatgacagaaaagtgatactaaaactagtacaaaattttctttttcattcttttggtaggaacagtacatttttattcatgatgccattttagaagcctgcttatgtggagaaactgccatacctgtctgtgaatttaaagctgcatattttgatatgattagaatagactcccagactaactcttcacatctcaaggatgaatttcaggtattaactatttctaaaacctcttttgtgacttactacaatttgttctgggcgctaggaatcctttcaaggaaggtctttcaagtcaaatttataacctttgatcctgttttaaatacaatacgtatctctttcattatacatattatatagtcacttttctattgatgaatttatatctactatatccaaaatgacaaataagttcagacttagggaagagcaaaggggaaaggtatcataaaagtcaaaaattaggccaggcgcagtggctcatgcctgcaatcccagcactttgggaggccgaggcgggtggatcacgaggtcaggagatcgagaccatcctggctaacacggtgaaaccccgtctctactaaaaagacaaaaaaaattagccaggcatggtggcgggtgcctgtagtcccagctactcgggaggctgaggcaggagaatggcgtgaacctggcaggcggagcttgcagtgagccgagattgcaccactgcactccagcatgggcaacagagcgagactccgtctcagaaaaaaaaaagaaataataacaagtcaaaatgagtggtgatttgtgtgtatttagtgtgtatttatagcctttttttcatgcagtcatacagattttgacctgggtcactcacaatgtgatgagatcaagcacattaattataactgagtctgggttcagtggcagctcacacctataatcctagcactttgggatgccaaggcaggcagatcttgaggtcagcagttcaagaccagcctggccaacatggcaaaacctcatctctacaaaaaatataaaaaatagccgggtgtggtggtgcatgcctgtagtcccagctactcaggaggttgagatgggaggattgcttgaccctggaagtttgcttaaccctggaaggctgtggtgagccaagatattgccactgcactccaacctgggcaacagagtaagaccctgtctcaaaaataataatagtaataataataataaatgaagtttgtagtacatgttatttcaaaatagccctaaatgttttcactgcccttaaaacacccctgaaggtgggtgaaaataaaatcaagggcagagaccaaattctttgattgttgatccagtgctctttccaacatgccatagcttatcttcaaatatggcaagcccagatgttactacaaatgataccgtttcccagtgtgatgaagggtcattatcataatggactgcccgattgcattttctttggttaaggcaatgcattttgcaggtagcagtgttgtttagcgtaccttttccttttaagaagaggagccctgaacaatgtgtgtcttgtttctttgtcacttctcaggcttcattagctttaactacaaggtctatcagcctgtcatagtagcaaatgccattgcctcgcacaaatccttcactttctacttggccttctaaattcctgatggatctgtgttatactgttaaatgggtcacactgtcttttaacctgggttctcttttctttttagactctgaattcagtcacccctcgactacaagctgaagactgcagtatagcgtgcctgccaaggaaccatgacaagaaccgtttcatggacatgctgccacctgacagatgtctgccttttttaattacaattgatggggagagcagtaactacatcaatgctgctcttatggacgtaagagactgccctctttgttagtgtagagtgttgtggaaagctacataatgcaactgaacactggctagttttcttttcgaggaaattaaaataacctaaaaaggaaaagtggaaacttttattgaaacacatttttttggaaaatgattttaggttttccctatagagattcttaagaactgtcatttttatagctttattgtagatttggagcttgattgtcaattattatattcatgtagtaaatattgcaagttataaatttcatcttaattattttcagaaaagaaaatcatgccttatctattttgaatataattagaaatgaattttttaaatcacagaatgccaaatcctacaaaaatcatgttaatttgggaaatttttatttctgacatttaatgtttcaataatttacaattaatttgttggccattaatcaataaggactattataagtaactagagaggggatggatggtattatgttaacacatccatcataatgaaagaacaatcttgccccattctaaaatcttaaattgcagggtgttatatagcccatagacagaacaatatggaaagaaagttttctgttttagtttttggtttttttttttttagacagagtctcactctgtcgcccaggctggagtgcagtggcatgatctcagctcactgcaacctccgcctcccaggttcaagcaattctcctgcctcagactcttgagtaacttggaatacaggagcgtgctctaccacaccccgcttattttgtttgtttgttgttgtttttgtttttgagacagagtttcgctcttgttgcccaggctggagtgcaatggcacaatctcggctcactgcaacctctgcttcccaggttcaagcgattctcctgcctttgcctcccaagtagctgggactacaggcatgcaccaccatgcacggctaattttttgtatttagtagagatggggtttcaccatgttggtcagattggtattgaactcctgacctcaggtgatccacctgcctcggccccccaaagtactgggattacaggcgtaagccaccgtgccgggccttttttgtatttttagtagagatgagatttcaccacattggccaggctggtctcaaactcctgacctcatgatccgcccaccttggcctcccaaggaaagaaagttttaaattatgactttggccactttactttgattatgttggaaagaagcaagaaagctatcatggtttataatctttttaaacagtttactgccttcatttctagcttttgccctttctcctatgaaaccatatcaaggagaaattagaagccacggttcatttctttctgactataacaggctttctaagttattgttcctgttaagcccacattctgtttctacgagtagtcttcaccagttactttactctttttggtgctgcaaagcggaatagtctaaaggcaggctctcgtccttgctgtggtcactcttgcctgtgaaaagctctcatccttgctgtgatcggagtcttgcctggccattaatcacatccactgaaatcacattaaatcctaattataccttttctttttatattaggtgtctggaaaggcaaatatactaaatagagagatggcatacaatactttttcatttctgcatctaaatatggaataaaaaaaggatgtgtgaacaagaaaaggagaaaataataatatttagaaaagcattgatgcctttgaattttttgccattggcatctttgtcaaatttttctcaatgtccagattgtctccttttcttttcttttttctttttctttttgagacaagctctcactctgtagcacaggctggagtgtcgtgcatgatcacagatgactgcagcctcaatctcctgggctcaagtggtcctcccacctcagcctaccaagtagctagaactaaggtgtatgccatcatgcccagctaattttttttttattattttttgtaaagatggggtcttgctttcttgtccaagcttgtctttttttctgtatgaaagttgaagcttgtaatccacctgctcttactgtctgcttaatcccctgtgattcaaaaaaaagacatttcatagttaaagctgttctggggatttagtagtgcaaatgaaccgttggagaagtaaagctggtttgatttacaagaacagggtttattgttcacttctttctccctaccctttatccccatcattagtacccttttgccaggtctatgagggattaggagctagggccaagaattctgtaatttcaaagccttacatatgttcctgcatttagagggaaaaagaataggaagtcttcagtcttctcctctcttatcagctcctcctcatgcatatcccctcccctgtggctcaaaaaatgagtagatagccgtcagtctgctttgacttacctttgcatggagcagacatttgattggaagaagagcttcctttcttctaacttttctcattgtattagttcattctcacactgctaataaaaacatacctgagactgggtaatttataaaggaaagagttttaattgactcacagttccacagggctggggaggctcaggatccctgcaattatggccgaaggggaagcaaacccgtccttcttctcatggtggcaggaaggggaaggagtgccaagcaaagggggaagccccttataaaaccaccagatgtcatgagaactcactcactatctggagaacagcatgggggaaactgcctgcatgattcaattatctccacctggtcctgcccttgacatgtggggattattacaattctaggtgagatttgggtggggacacagagccaaacaatattactcatgaaccttcctgcctttcttaggagacactcatcccagctgcacgtgtaacttggtaaggttttgaggtcatttagaagtagccaggtaaattattattgtcatctactcagatttatcctgcagtcttcagccaacgctgaatgccatggttggtagcatttcccaaatggtggtagcatcagtgaagtccaagaaccagttcctgtgctgatgttaagattcttgaaggacttaaatagtagtatgatacaaatgagttacaagatcattgaaaatttttgtcagcattagggaactctataatctactaattattattattattattgcaaataattagtttaaatcaaatggcaattgtccagtccagataaatattgtttttactacttctccctttggaaagagataatatattgtgttctaatcaaggaggacttggttaacaaggagctatctccccgcttatgtggggacaggaaatatattgctgttatgctttggtgcttcaggatcttaaatggttgagactgtcattatgacctttgatatatgttagaaatgcccaggaagctgtggaaggtggattgtctgcaagatgtgcagaatatcctggtagtgtccacataatgtaaaagcacaagtgtttgagctacttgtggtttttcttatttggagtggagaagagtaaaacaattttacttgcacgcacacacactatacacatacccagatgattgatagacataccaggggttttgtgcttactttgccttcagcctctcagagactgattacgtttggaaaattgaaatagcccaacaggaaccttacagaggatgttaacctcagaagctttttagtttcttcttttgtatttgtcctgtatttacgtctttcagtaaagtaaaaactcagttattgacttgaattgctttggaagcattgaagtcttccaccaaattgattcattactgtactaattcagttcattccagtggtctgaatctcctattccatggtttaatcatcactctggctccttctgcatatgaagctattgcatcttactggtcctacattgaagtgtattgtatctgtttgtacaaccgatcatacattttaagtttttatatttctccatctaccttgtttcttcacagagctacaggcaaccagctgctttcatcgtcacacaataccctctgccaaacactgtaaaagacttctggagattagtgtatgattatggctgtacctccattgtgatgttaaacgaagtcgacttgtcccaggttaatggctatggattgcttttatgtacttatatacaacttaatagagtagtaatgaattgctaaaatctgctttatactatcctaactagaaaaaataatactctttttttttttctttcaaaacgttcatcatttagggctgccctcagtactggccagaggaagggatgctacgatatggccccatccaagtggaatgtatgtcttgttcaatggactgtgatgtgatcaaccggatttttaggatatgcaatctaacaagagtaagtcactatcggatcctttgagctgatctagaataggtcagtcataaccaagatgtggtataattttattcagacaacagggagactacaattaataagcactatatcatccacctcaaagctagtaaccatcttatgccttagtactcgaataaaaatacaggaaaacagaaatgctggaagctaggtttttcggtcagtcactagactagcatattctctcaggaaatacagatgcactggctcagtcaagttggacagcctaggcctggcctctgagtgtatgtagacttatcttaaggatgactgcatgttttattagtattgacatccagcccagaaatggcatgtgataaaaaaaataagaacattgcaataacaataatgacagagaaactgtactgcaggaggaaagagacatgttggatcaaccattatagaagggttccatgtcactgttccaagttcattattgattatcctacctgcaatttcatcttcctaaacgtctcaacctatggctctaagcagatctaaaggtagaaccagtgctgctaccaccatgccttttcccagcagcaaagtagtaactgtatcgtctttctctgactcctcatttgctttccactacatgacaaattcaatgtgggtggggaagatcttaaaaaaaaaagtgctaataaagcccgggcacagtgcctcatgcctgtaatcccagcactttgggaggccaaggcgggcagatcataaggtcaggagttcaagaccagcctggcaacgtggtgaaaccccatctctactaaaaatacaaaaattagctggacatggtggtggcatgcctgtagtcccagctagtggggaggctgaggcagcagaatcatttgaacccgggaggcagaagttgtagtgagctgagatcacgccactgcaccccaggctgtatagagcgagacttcgtcccccaaaaaaagatattaataaaaacaatttagattatgtaaccaaataacaagcagaattggaaaagaaaacattagtaactttcatgaaattaagctctttttagagagaaacattactctgttttttaaagcaccagctctgtgggtatgtattttaagtgtgtgattaggattatcatgtttcagtgtctctcatatcaaaatgactacgtgtgtgtctggttaataagtctatatgtatataactatgagcagggaatggaatcatatcgactcctattgctcatttcagtggagaaaaaaaggataacttcaatcatctcataatattcatgcatatcttagatgttaatttaaatggaatctcattatgtctgcacatctgttacattatggttctagtaatnnnnnnnnnnnnnnnnnnnnnnnnnnnnnnnnnnnnnnnnnnnnttctggtccttattagtacatgattttttttctgttctcactctcatcatttaatatatttaatatatttaactgcatcaaacatttaacatgtaccaacaagtttgtagagtactaagtagggcttgtaatctaccaaaagatgcatgggctcttgccaatctgatatgatttactcatatattacatattcttcctgatatttttatttcaaggtttaaggttttgattcattctttcaacactactacttttggggaagtattatgcaaagttctactgatacagagtgtaggaaaaaaagatttccgtgtacttaaggaatctttatttttttcaggaagaaaagcattacatgaaaattgtataatcctttttgtataaaagtgatgcattttacagtgaaagagtaaagaatatagagtgtttaactgggtgatctgacataactgtgtgatcagagatgacctctttgcgatagtagtatttaagccaaaatttaatgaatcaatagaaattagttgggggttgatgtaacccaccatcctggtttgcccagggcaggagctttcccaagacacacagccttcagtgctaagaccagagaagtcccaggccaacctgggacaagttggtcattctatttgggattgagaagaccaagcaaggaagaagtattcaaggcaaagggtacatacagtatatgcaaagtccccaaggcaagaagagacttgatatatggattaaaagaagacaaagagaaggttgaagaagggggtggagccagatcacataagtttttttaagccatgacaacaatttggattttatgctaagatcatttgaaaatcattaaagcaggaaatgacaagattgtatctgcagttcaaaataatcatgatgcctatagtaagaatggactggaaggagatcaaagtttattcagggagatcagctaggaggtaattatcagaacctgtgactagtagtgtattgatgtcagtggtgataaagagaaggcaatgaatctgaaagttatttaggaaatgtaatcgtagtaatgaattactggatacatagtgcgagggagaaacaggtataaaggatgattgccatgtttcctgctgttgtcacttagaatgtttttttactagcatgtacatattgaggatttatatcagctagactcaatccagtgtagatgccatttgtattgtaaattatatgcaccttttactttttagtaaaaattgtagtcccagcgtatttacataaaaacacttccctctacagccacaggaaggttatctgatggtgcaacagtttcagtacctaggatgggcttctcatcgagaagtgcctggatccaaaaggtcattcttgaaactgatacttcaggtggaaaagtggcaggaggaatgcgaggaaggggaaggccggacgattatccactgcctgtgagtagggcagctcagcctgtcattcatggggccttggtgcttattttctcattttcaatgttaaagactatctggcttgcatcttatggacctcccatagatgttatttttaaacagtcttcctgtctcatgagtctataattaactactaagtttattttgtatattttctaaatattgattattatatagctatattatttaaactctttggaacactactcgtaacaacttctgatttacacagtttacaaatatatcagaatctcaaagtctagattgcagcaatctatgcctatagcattttcctgagtataagctactgatctaatttcatcctcaagttttctcctctctgccttgtacacatataaagcaaaattaagacacaaatggaaaacaattaaaactacaatgtcttattttcccaaacatatatgatggtgtgacctgtggtcacttggtgctgctatctaaaatgcctttgctttctttgctttcagaaatggtggcgggcgaagtggcatgttctgtgctataggcatcgttgttgaaatggtgaaacggcaaaatgttgtcgatgttttccatgcagtaaagacactgaggaacagcaagccaaacatggtggaagccccggtgagtcacagaatcttagatttggaaggcatcttagagattagttagtcatatacctacttattgatttgacttcatacacacatagggaatcagatgtgaaaatgagacgttgtggggactttcctgcctaattaatacattgctgagcatccccctctacccacagacacttaatcacgtattgcataaactgctaatcatgaaactattttcatttaatttgggaaatttgtaggattttttttctgttatagccaaaaaatatttgctgcagtaaactttggtaaatggtcctataagaagaataaatcctatatcaaggctgtatgtctaagggatataggtttcatcagtaccttagacacccagtatttttaaaaggcaatgaaatttagttttgtcattatctataattattcattcattttctgatcaaattgtaaatggttaaactatcatggttaagttttcagcttttaccaactgtagagggcagttcatatcatgctacttgagcttgtcaaggctcgtaaagtcagaacatagcttacaaaataagagctgataggtatgtgtgtgtgtgacagttcatctaggtgaagctgtatgcagagtaagaaagaaagttacacttatctaacacattttacttctaacgagagatatctgtgggttacacatatgtatgtgcatggtgggatcaggttgggagcagctgtgtagtgtatgctcacagaaaagtaaaccagaaaaaccaaggcatcattgttgcttgccctacatttatcaagatgatcagataactagaatgagcaattcaataaacctttaaagtatttcaccacttcctgctcatggattgctcgcacaagagttgcgttgcttcctgagacaaaatctgaagacttaggtttgtactgtttcacttttacaagcggtaccagacttccaccctttctacaggtgtcctcaaactccctacaccacctcatttccctgggttgttgcagctgtctacacaagattacattggttttgattggggtgctggctatggagatgagaaaggggggatgaatcggagggatttttgagggagaactctcagatcgtcttagcaactaaatgaatagtggttatgtctctaaactttgcgatttgaagatttcttgatgtaaactctgcctccatttttcaggtcaagtcttaaaatcatcagtgggatcatttctgacttcagaattcaacttttaccttcaaatttaactgatttcccaccttttttaattaaaaaaaaaatctatggttaaactgtgccattctgggaccttccaaaaagttactattttcctttacattcatgtcccgtgaatcctgaacaccccaccctctgatttgtgtttaatcagtgttgatgattagtttagtgagctgtggagttgagctgaggagtttggtgaggagatttagagtgaaggcaatattgctggagactgcttaaagagacataactatttctaggcacattttggttccttgaatgcactcgccacagtggtaggtgaatttgaatcataactacttggtgaatagtgttggaatgataaagacctcttaaggaaagttttattaccctagtttattgctggagacacctcgaacttctattccaaaataatatgcattttagactgttctccagcctgaattttacccacttgaatgaactgagttgggaatttttaaatgaattgcatattataagtaatagtttatgatatggtctctgaatttttctaaattcttattatggagcaagtccatagatgggcttagaggaaaggcagttttaactcaaaaattttattgccaatatgttgtcttaaacatataaaggcagcagaaatacattttcaggtataagtaggctcaaaatttaaggatcactaaccattcttgaaaaatttgcttaaatactctgatggacaaaaacagtgtcaaaaattaagaacttgaaattgcataaatggctgtttaaaatggctggctttttttttctcaaggaaatcatctgaaatatatggagaaaaacatttgcagtttatcactgtagcattataaaatagagaaaaaaataaaagcaacttaatagtcaaacaatacatatatttgatttttatgtggtattaaaagatgttaaataacatggaaaaagaattgtaacaatgttaaattttaaaagttacatttaaaattatattttgaaatatacatagttatatttattctaagataattatttcaaccatgcacaaaaagaactgaggcaaactaaggtgatattttaacaatttcttctgatgatagaattatagctctttttctcattctttatatttgttcagaatgtgtatattctttatatttgtacagaattgttctgtaatgatcaaatattactattataaacagataaaaaattatagatatttaaaaaattgatagaaaatatgcggcaaagataaaatgtctttttaagataaatttcctttttcttaaatggatcattagactcaagtataaaatatgtatgcctagatattaatctcatatatagaaaaaataaattgtaatccttgagtaatctaaattggttgtcaagtttcatttggtaactgttattcaacattagtctctttcttaagttttctcactctttgtgttttgacatctttcaggagcaataccgtttctgctatgatgtagctttggagtacctggaatcatcttagttgggtgagactctttaaagtgcatccatgaagaaacctgtccatctattgagccagcagctgttgtacctgttacacttgtgcagaaagattttaatgtggggggtgggagacttttacatttgagaggtaaaagtattttttttatgaagttgtgtatcttaataaaaaggactgaattagtttttattctatataaagcatcaacatttcatgccacannnnnnnnnnnnnnnnnnnnnnnnnnnnnnnnnnnnnnnnnnnnnnnnnnnnnnnnnnnnnnnnnnnnnnnaacatgccaccttttttctcatggtttcagtagagcagctaccacatgttgcatgagttcatactttctacgtggcatttttctccctttctaaaatgaaagctgatgaatcttaaaaggaagaagaaaagaaaagctgtgcaaattcatagtaaagttcgttttttatatgtttccagtgtagcagatctctatataaatatataaatatatataactggcttattttcttttaatgtgcaatgatggctggatcatttaaagttctttttagaaaataacataagccaaagactcaagtgtaaatatgtctatatggagaaagcacattatatttattggttacttacattccttttttgatggctaaaatactaccaccacacaatcatcttttttttcctgaagaaagctttttctttagctaaaatcaattgtaaacgatttttgtagattattttttgtatgttttagtgtaagtagaagataaactttttattcataaaccaggaagcaatgttctttatagtgattctcttgtgtacatgcttgtgaattaaatttgtgtaaaatcccttggcaattgggtcttttaatataggaccaaattaaaacattttgctgaatatgtatagtttttcacaatttcattaggtaaataatggtttggtgatcatacatgagaaatgtacacattaaaaggccttgctgacaacttgcacaatgttgaacatagcctttaagcatcatttaaattttaaaggaatggagtttttcagcctgtggcccagcactggtcaagaaaacaagatggcaacatatatgctttcagggtcaaatttgagcaaactgtaaactgtcagggtgataaaatgtttctcttgatgtttacatgcacaagctttgcgttctgactataaaaagtgtgaacaaatcaatgccagattcctgttttgcgcattgtcatgggattcttaagtgaacctttctaaatgtggtcttgttcacatgctccacgtagctgtaacttcacatcatcagcttgcagtttgtaattgactaaagcattccagtgtcctctttctagattgccagctcatgacatggtgcttataaagatttaattaaagtaagaatgaaataaagtttttataattataacagttattgtttgcacatcattttttcctcttaatgtttatgcattcaccactaaatgagtagcttattcctatactcgttgatacaagtaggccacaaaaactctatttaaagagtaaaactgatttccaacctctagtttcttttatttttattttcttaatttaatgccaaaatgtccagtaggtggagatggaaaaggccaggagattgacatcattttttgtttgttggtttctatatttatccatgtatgtaatacacattttccatttgtgtttgtcactatccatttatataatacacatcttacttttttcttataaccaacatgacaaatggtacttatgatccctattttacagatgatgaaatggaagctaatgagaaggtacatgatttgtcaacagattcattcttacttagcagctatgtctttaccactaaacacattgtttcccaaatgtcacaaagatagacaaaaaaatttagaatttcatttctattgttcctcattaatcaattttctcttaaagtattattatcataatggacatcttcaatctcccatttgctatgtactttattagaaaatgcgtgactttttaaaaaattcagataaagcaaacttttcttaggaaagctgattttcatttaaacatggaggcatttaacaaaaaaaaatccacaaactcgcccaagattttttttacccggtaatgtttattatgttatcctatagaagattctgtttcactgtgtgacactgacttcatttctgctcatgactgcaccacacaccagcaaagttatcatgagcacaactgtccacaaagctcagaggtctgtgcagcctctgtaattcaaagaacaagagttctctttctttgtaacaggaaattgaaatatcatgcttgctttgtttgggcaccacagaagccacttgatcaggagacaatggaagaggggttgcctgttgctctcaaaactcatattcaaaagctcatatcttatacccttaagggctccctaagtagtcttgtgcatgactatgttctccgacacccccagccatgtccctctgggcggatgtcctggtgctggctgggggtggggtcctcttccactggcacagctctacatgcttttcatagtttagggcttcctattcctaatttagttattccttaaatggctgtcatgtcgttgaattttacagaccccctttctataactatcactaaggagatgttggaagtgtgtgggccagagacacaccagcaactgggaatttttgagttttaaaaccattcttggaaataagtgttatctctcttagagttgtctcctagccttttctaatacttaggctttggagtctgtattagtcaggattctctagagagacagaactaataggataaatatataaaggagtttattaagtgttaacttacatgatcacaaggtcccacaataggctgtctgcaagcttgaggaggaggagagccagtctgagtttcaaaatggaagaacttggagtcagatgttcaagggcaggaagcatccagcacaggcgaaagatgtaggcagggagattaggccagtcttgccttttcacgtttttctgcctgctttatatttgctggcagctgattagattgtccccaccagattaagggtggatctgccttccccagcccactgactcaaatgttaacctcttttggcaacacatagacacacccaggattaatactttgtatccttcaatccaatcaagttgacactcagtattaaccatcagtctttagataaaggtgttgctgtgttgcagccaaatgatctctgacattgaaagataaacaaaaggggagatattttttgcctggacatggagaggctgcatgtttatctccacactgatgtgctgatgtgctcattcagtattcatattaccacaagaatctcttgagttccaggcattcatgtcgtaaacttggaagtcagacaccaaaggctgctccttctcatatctactctccttccagaaaatggtgtaaggcaagaggttcttagcacctgaacttaatagataccagtaaatactaaaatgcagaagagcaggggctgattgtagctcaactgaaaatatgaggtgggcagtctactagctttggaagaccacctttgagatttgcctttttttttttttttgagatggagtttcgcttttgtcgcccaggctggagtgcaatggtgcgatcttggctcactgcaacctccacctcccaggttcaggcgattctcctgccccagcctcccaagtagctgggattacaggcacctgccaccgcgtcccactaatttttgtatttttagcagagacgggggtttgccatgttggccaggctggtcttgaactcctgacatcaggggatccacccgtcttggcctcccaaagtgctgggattacaggtgtgagccaccatgcccagagatttgcctaactttcataggggagtgacaattcagcatttatatttaatttctgtgcactttggcaagcattctttttaataacaaaatagccagaaatcaataatccatcacataccctgggtataatatgtaatatttaccttataaaatgtttccataggcagagactccacatccttcctagacttatttcagtgttttagtaaacacccctacttagtgtagagtctatgtgccatttcattcaacactgagtgaagctagaaggcggctggctgtgcctcccttaatcatttctacttacatattatttcatagcctcacagcttagggaggtttggagtagaagagatacctgaatttgttcacaactccagtctgttcaagcagtctgcagagtattcgagtattattatatctctctgaaactaaaaggaaaggctactttaagtagctataagtggctttttggaatataaattggccaaaaatcaatggaaatgtggtagatatatatgacacttctgaacttccagcttcctccaaagtgaattgaaatgctagctaacctggaagataacgaacaacacagagaccctgttgttatcaaatccggaaagacaccaatggagagtttctaaatcattgaagcaaacgtaggtcactatggaatatctgaaagctccttctttaatgttaagactgttgaaactaatcaactacatcggaataaatcagcactcaattttctgtgttagatgttaagtattgtcgatcatttaatacaattggcaagtccatcatcatgagatgttatctgtcataaaatgccttccttctcatgttctctgggcagatttgattagtcttttaggatatattagtcttgattccgtcaggaatatgtagcacttaggccataagaatccaaccctcagtacttagatataatctatgcagtctattcagatatagaatatgaagaacaggaatgtctaaattgagtcaccaatgacttcttttcttgtttttatatttactttattttattttatttcttgagacaaagtctcactccatctcccaggctggagtgcagtggcgtgatctcagctcactgcaacctctgcctcctgagttcaagtgattctcctgcctcagcctcccgagtagctgggattacaggtgtgcgccaccacacctggctaatttttgtatttttagtagagacggggtttcaccttgttggccaggctggtctcaaactcctgacctcgtgatccacccacctcggcctcccaaagtgctaggattataggcatgagccaccatgcctggcctcttttcttaaatagaaattagaacgtacagataggcaaagtccatgcatttagacaatgctgcatggttggggagacaaaatctaactgagaaagtagagaaaaatatgaatgtcatggcatccacctactatttgttgagaaaagagttggaaattcatgcctgcaaggccagcagggaccatgagtgtgggaagtgagccatgtatatttaagaatggtcactcaggtcatattattacaatgaacgtccttagcttgtgtgtttcctaataggaatatttttcatctctacaagaaaattctgcctcctagttttattaaaacacatgttcctattgattaatcttgcattttcccactgttgattcaaaaatggatactagatattctgccatattcagctgtactgtaagaaacacaaaaaaatgtgagtgataataaatggtacctgctgtttgacatggggacaaaagggagcaatgtggggagggctgcccccactgggactcgaaagcacatgcaacacctgcagcagcactaccttcctgcagcctttgctgcacaggaatatggacccaagcatggcccatttcccaagagaatgtagaaatcaaaatgtttagattaatttagaaacttttccgaatgttggtaaccaattaagtttagaaatacagatgaaaacaaacctctggcccaattctgtgcagaacaaaccaaccctgtctgaaggctacacttgctgtggttgtgtaagagcttcaggctcccagtctgtgacctccattatggaataactggttttactgttttaacttttttaaatcatttaaaagaaatatgagttttagctgtcttaaaatagccatcataactgttttccatacatgttcttttttcctatttgccttgtttcctcacatatttttctgttttaaaaatacatgtagatgaatcttgactcctaagataaaaacaaaacaacaacaaaaacaagatcagcttctctttctgctcctttgtacctggactaaattcagaagagcatgtttcagaaaataattcacacattttacctagtaagcactccccaaaatgatgagtaggagataattcttctggaaataataatactgagaactcaaaaggggagcagttgttctgtgagccgtgggacagccagaacgattttagtcacaagtgcagaatagcatctgtggaagcatcgcatttccagattgtgatgatgcctgctgacttccatggcaggtgtaaagcagtgtgggctgttgccagctcacaatgggaacctgaactctagttctacaaatctaattacctgaagcacagtcagcagaccaaaattgatttcaccttcatgttatattcttggaatgataaagtatgtattcattaatttgacttatttttcaacgtcaagttttttattgcctgtgatcaaatgtgatcattgaggaaaaagaatctcattttctcgtaagaaattagaggattgatatttttctcatgaaattatagaatattagagggacattagaaattatctaatcctatgcccttgttgttaaggttaagaaattaaaacctagtgaagtcatatgtctatctgaagagggccatcccgtaaatagtttaagctttgcaggctattggcttatgttaccttgttgccaggagaccttcccttgaagatttgctgaagaaggtcttcaaacaggaagtaaatgatagaagaaggaattttcaagtatcaggaaaggagaaagaacaatggatagtagaattatgggtacctacaaaaacattatttacatgtatttgtctcataggtcgtttttgatgattgaaacaaaaaaattccaacaccatctgaaactcaataaaatgatagttaaaagtgggaaaggaaagacatctaagtagaagtaagatttttatacttcacttgacatggtaaaatattgataccactagattgtaacacatcacatgttacaggataatcatcaaagaaaccactgagaaaagtatatgaaaaaatatgctcaaatgcactataagtgaatcaggatggaatcctaaaacatgttcacataacccaaaggaaggtaaggaaagagaaacagatgaataagaaccagagaaaataaacagaaaacaaataaatgacagttgctaaactatcaataattactttaaaagttttttttaaaaagccaataaaacatataatttgacagactgcataaaagccaactacaaagaacatgacccacctatataatatgtataagaatatcagttcatattcaatgaaatgggtaggttgagagtaaagggaaggaaaatggtgtatgtataccatgcaaacagtgaatttaaaaaatcatgagtagctatagtaatatctgctaaagtagactcatgcaaaaataaaattactgcagacatagagggtgattaactaatgataaaaggatcaatccacaaggaagacataatagtgctaactatacataccaaaacacagagtccccaaatgcgtgaatcaaaaactgatagagatgaaattagagaaatctacaattatggttggaaacttcaaatacccactttctgcaactggtagaattactagacagaaaatcaacaaagatatagaaatctacaatacaatcaatcaccagatctaattgatgaaatatagaatactcaacaacagcagaatacactttattccagttcctatggaacatttaccaagataaattatgtcatggaccataacacaaacctcaacaaaacacatttaaaataattctgtagagtatggtctttggccataaagatatcaaactagaattaaataacagaaagacagtaggaaagtctctaaacacatggtaattaagctatactctaccaagtatttcatgagtcaaggaaaaagtttcaaaggaaactttttagaacagaactggaggaactgtaagtatcaaaatttctgagagacacctgaagtagtcctgagcaggaaatttatagcattaaatgcttacgtttgaagtgatggaagctctcaaatcaattacctaagaacctatctcatgaaaacacaaaaagaagaaggaaaacaaaagcaaacagaaggaaggaaataataaagataagagcagaaatcaatggcaatgaaaataataaaacattagagaatatcaataaaaaaattccaaaatattaataaaatcgataaatctctaacaagacagacaaaaattaagagaaaaaaataagtatcaagattgaaacagaacatcattatagatactgcacacattaaaaagatagttgagccagcaatcccattacagcaaccccattatgcccaaaagaacataaatcattctgccaaaaagacacatgcacttgtatgttcatccttatgctattcacaatagcaaagacatggattcaactcaggggcccatcaatgatagcttggataaagataatgtggtacatacacatgatggaataccatgcagccacaaaaaaaggatgaaattatgtcctttgcagcaaaatgaatggagctgaaggccataattctaagcaaattaaggcaggaacagaagaccaaataccacatgctctcactcataaatgggagctagagtacacatggacataaatacaagaacaatagacgctgtggagtactagagaatggggggcggggcgttacaaaactatcaggtactatgctcgctttttgggtgacagtatctgtactccaaacttcagcaccacagaatattcccatttaacaaacctgaacatacacctactgtatctaaaatagaagtcgaaatttaaaaaaagatagagaatactgcaaaaaaactttatattaaaaaattggacaatttacaaaaaaaaagagagcaaatttctgaaatactactaactgttaaaacgcaactaagataaaattgatattctggaaaatacggaaaataaaagcaacccaataaaagcagtaccattaaagaaactgaatttataatttaaaaatctcaaaaaagaaatatctgagcttagattgtttcattggaaatttctaataaacatgtaaagaattagcactgattctacacaatcttttccaagaaaatagaagaggaggaaacacttttggacttccaagatctggacaggaaagcacatagattgcagctttgcagaggacccagctaaggcatgcctagacttcctatccacagaaagtgtgagatcatatatgtatattgttttttaagtctctgagtttgtggtaattcattacattgcatggaaaactaatacaagagggagtgaaagtggaaaaaatataattaatgtatataaaaatatacactacaaacaatgaagaaaatacacatggctcctataatcctcatttctgtaacggggccatgagaccatggttcgtatttatggtttcccttttatgggatacaggcccattgccccattgccctcaaccagcacctgagagtgagataacccaaatcttaatatctgaagcatctagaaccgcttttattgggctgcttttatttcctgttaaccattagtactagacatgaaaatacagagacgtttctccagtttcctgtggctactataacaagttaccactaacttggtggcttcaaacaatgaaactttatcctctcacggttctggaggccagaaatcagacatcacggtattggcatagttgattcctttttgaagctcttagggaaaatctgtcccatgcttctctccaagactctttggctgccggtgacctttggcattctttggatctttaacattcttgacttgtagatgtatcaccctaatctatgcctccaccttctcatggactactcctctgcatttctcctcttctgatccatgtcttcttcaaagacacctgtcatcagatttagggctcaccctgataattcaggatgatctcatttcaagatccttactttaattaaaagtgcaaaaaagaaaaaaccctttttccaaataatattacattcacaggtctagaaagccacatcttttcgggattgggggtggggagcaccattcaagccacaacagaggtgctccagaaaagcccttgaattctaaacagttatcctggccccagcaaccgtgtacttgacaattagtagcaatcacccaatcagtacaaaaacccgacacccctgtccactcccatgtctattggtctattgtttaactcaaaaggagccttgaagcccagccggcagagtcaacttccagctcaatgaaaccattactgggtcctctgagaaataaaatttcaagatcaataaagccaaaatgtcagagaaggaaagcagaaaactgtgattgcttcattggctgtaatattgagaagaacctctactactttcattccttgtttcagctgcctgtatcactggtccagtcaaccagggccaggaagcacaggcacagccatgtgagggatccatctggatccaggaagccaccatttctaggaagccagggatacacatgcacatgtgtgtgtatgttcagatacacgcttctaacatatttccaaagatatgccccactacatgtatgatgcaccagatcatccaacgatatccaatataaaattataaaatttttgaaccaccctccagtggtagatgatctaaataaataaatctcatgtattgaatctagagaaaaaaatattttgtaacctttaacccctgagtccataatctctttttcaaatggagaaagtacccttttgcagtatagtccttttcttactactggggtattaggttagtgcaaaagtaattgtggttttggaccatgaattttaaatcattataactaggctcaaatacatctttattaatcaaaatcagaaccattataatcaacacatttttgccaatgataaataagtttgtttattctggtagtataaaaatctgtagtggaaagcattttctgcatcctgctggttgtggaagtgttttccctgcataaagttgttgagatgtttgaagaacaggtagtcggt

SEQ ID NO: 138 - DNA, 5936 bp, Homo sapiens
agcctccgccgagcatggagagctgccgccgcggccggccggcgacgctggcgacgctttcgcccctgaggtagtttggcgaccgcgaagaaggaaaaagggcgggcgggcggctgtcctctcaccgtcctcaccccgcgaggcccggcccgctcctccgtcgtggatttcgcggcgatccccccggcagctctttgcaaagctgcttgaaacttctcccaaactcggcatggatacgactgcggcggcggcgctgcctgcttttgtggcgctcttgctcctctctccttggcctctcctgggatcggcccaaggccagttctccgcaggtggctgtacttttgatgatggtccaggggcctgtgattaccaccaggatctgtatgatgactttgaatgggtgcatgttagtgctcaagagcctcattatctaccacccgagatgccccaaggttcctatatgatagtggactcttcagatcacgaccctggagaaaaagccagacttcagctgcctacaatgaaggagaacgacactcactgcattgatttcagttacctattatatagccagaaaggactgaatcctggcactttgaacatattagttagggtgaataaaggacctcttgccaatccaatttggaatgtgactggattcacgggtagagattggcttcgggctgagctagcagtgagcaccttttggcccaatgaatatcaggtaatatttgaagctgaagtctcaggagggagaagtggttatattgccattgatgacatccaagtactgagttatccttgtgataaatctcctcatttcctccgtctaggggatgtagaggtgaatgcagggcaaaacgctacatttcagtgcattgccacagggagagatgctgtgcataacaagttatggctccagagacgaaatggagaagatataccagtagcccagactaagaacatcaatcatagaaggtttgccgcttccttcagattgcaagaagtgacaaaaactgaccaggatttgtatcgctgtgtaactcagtcagaacgaggttccggtgtgtccaattttgctcaacttattgtgagagaaccgccaagacccattgctcctcctcagcttcttggtgttgggcctacatatttgctgatccaactaaatgccaactcgatcattggcgatggtcctatcatcctgaaagaagtagagtaccgaatgacatcaggatcctggacagaaacccatgcagtcaatgctccaacttacaaattatggcatttagatccagataccgaatatgagatccgagttctacttacaagacctggtgaaggtggaacggggctcccaggacctccactaatcaccagaacaaaatgtgcagaacctatgagaaccccaaagacattaaagattgctgaaatacaggcaagacggattgctgtggactgggaatccttgggttacaacattacgcgttgccacacttttaatgtcactatctgctaccattacttccgtggtcacaacgagagcaaggcagactgtttggacatggaccccaaagcccctcagcatgttgtgaaccatctgccaccttatacaaatgtcagcctcaagatgatcctaaccaatccagagggaaggaaggagagtgaagagacaattattcaaactgatgaagatgtgcctggtcccgtaccagtaaaatctcttcaaggaacatcctttgaaaataagatcttcttgaactggaaagaacctttggatccaaatggaatcatcactcaatatgagatcagctatagcagtataagatcatttgatcctgcagttccagtggctggacctccccagactgtatcaaatttatggaacagtacacaccatgtctttatgcatctccaccctggaaccacgtaccagtttttcataagagccagcacggtcaaaggctttggtccagccacagccatcaatgtcaccaccaatatctcagctccaactttacctgactatgaaggagttgatgcctctctcaatgaaactgccaccacaataactgtattgttgagaccagcacaagccaaaggtgctcctatcagtgcttatcagattgttgtggaagaactgcacccacaccgaaccaagagagaagccggagccatggaatgctaccaggttcctgtcacataccaaaatgccatgagtgggggtgcaccgtattactttgctgcagaactccccccgggaaacctacctgagcctgccccgttcactgtgggtgacaatcggacctaccaaggcttttggaaccctcctttggctccgcgcaaaggatacaacatctatttccaggcgatgagcagtgtggagaaggaaactaaaacccagtgcgtacgcattgctacaaaagcagcagcaacagaagaaccagaagtgatcccagatcccgccaagcagacagacagagtggtgaaaatagcaggaattagtgctggaattttggtgttcatcctccttctcctagttgtcatattaattgtaaaaaagagcaaacttgctaaaaaacgcaaagatgccatggggaatacccggcaggagatgactcacatggtgaatgcaatggatcgaagttatgctgatcagagcactctgcatgcagaagatcctctttccatcaccttcatggaccaacataactttagtccaagatatgagaaccacagtgctacagcagagtccagtcgccttctagacgtacctcgctacctctgtgaggggacggaatccccttaccagacaggacagctgcatccagccatcagggtagctgatttactgcagcacattaatctcatgaagacatcagacagctatgggttcaaagaggaatatgagagcttttttgaaggacagtcagcatcttgggatgtagctaaaaaagatcaaaatagagcaaaaaaccgatatggaaacattatagcatatgatcactccagagtgattttgcaacccgtagaggatgatccttcctcagattatattaatgccaactatattgatggctaccagagaccaagtcattacattgcaacccaaggtcccgttcatgaaacagtgtatgatttctggaggatgatttggcaagaacaatctgcttgcattgtgatggttacaaatttagttgaggttggccgggttaaatgctataaatattggcctgatgatactgaagtttatggtgacttcaaagtaacgtgtgtagaaatggaaccacttgctgaatatgtagttaggacattcaccctggaaaggagggggtacaatgaaatccgtgaagttaaacagttccatttcacgggctggcctgaccatggagtgccctaccatgctacagggctgctttcctttatccggcgagtcaagttatcaaaccctcccagtgctggccccatcgttgtacattgcagtgctggtgctggacgaactggctgctacattgtgattgacatcatgctagacatggctgaaagagagggtgttgttgatatttacaattgtgtcaaagccttaagatctcggcgtattaatatggtccagacagaggaacagtacatttttattcatgatgccattttagaagcctgcttatgtggagaaactgccatacctgtctgtgaatttaaagctgcatattttgatatgattagaatagactcccagactaactcttcacatctcaaggatgaatttcagactctgaattcagtcacccctcgactacaagctgaagactgcagtatagcgtgcctgccaaggaaccatgacaagaaccgtttcatggacatgctgccacctgacagatgtctgccttttttaattacaattgatggggagagcagtaactacatcaatgctgctcttatggacagctacaggcaaccagctgctttcatcgtcacacaataccctctgccaaacactgtaaaagacttctggagattagtgtatgattatggctgtacctccattgtgatgttaaacgaagtcgacttgtcccagggctgccctcagtactggccagaggaagggatgctacgatatggccccatccaagtggaatgtatgtcttgttcaatggactgtgatgtgatcaaccggatttttaggatatgcaatctaacaagaccacaggaaggttatctgatggtgcaacagtttcagtacctaggatgggcttctcatcgagaagtgcctggatccaaaaggtcattcttgaaactgatacttcaggtggaaaagtggcaggaggaatgcgaggaaggggaaggccggacgattatccactgcctaaatggtggcgggcgaagtggcatgttctgtgctataggcatcgttgttgaaatggtgaaacggcaaaatgttgtcgatgttttccatgcagtaaagacactgaggaacagcaagccaaacatggtggaagccccggagcaataccgtttctgctatgatgtagctttggagtacctggaatcatcttagttgggtgagactctttaaagtgcatccatgaagaaacctgtccatctattgagccagcagctgttgtacctgttacacttgtgcagaaagattttaatgtggggggtgggagacttttacatttgagaggtaaaagtattttttttatgaagttgtgtatcttaataaaaaggactgaattagtttttattctatataaagcatcaacatttcatgccacaaacatgccaccttttttctcatggtttcagtagagcagctaccacatgttgcatgagttcatactttctacgtggcatttttctccctttctaaaatgaaagctgatgaatcttaaaaggaagaagaaaagaaaagctgtgcaaattcatagtaaagttcgttttttatatgtttccagtgtagcagatctctatataaatatataaatatatataactggcttattttcttttaatgtgcaatgatggctggatcatttaaagttctttttagaaaataacataagccaaagactcaagtgtaaatatgtctatatggagaaagcacattatatttattggttacttacattccttttttgatggctaaaatactaccaccacacaatcatcttttttttcctgaagaaagctttttctttagctaaaatcaattgtaaacgatttttgtagattattttttgtatgttttagtgtaagtagaagataaactttttattcataaaccaggaagcaatgttctttatagtgattctcttgtgtacatgcttgtgaattaaatttgtgtaaaatcccttggcaattgggtcttttaatataggaccaaattaaaacattttgctgaatatgtatagtttttcacaatttcattaggtaaataatggtttggtgatcatacatgagaaatgtacacattaaaaggccttgctgacaacttgcacaatgttgaacatagcctttaagcatcatttaaattttaaaggaatggagtttttcagcctgtggcccagcactggtcaagaaaacaagatggcaacatatatgctttcagggtcaaatttgagcaaactgtaaactgtcagggtgataaaatgtttctcttgatgtttacatgcacaagctttgcgttctgactataaaaagtgtgaacaaatcaatgccagattcctgttttgcgcattgtcatgggattcttaagtgaacctttctaaatgtggtcttgttcacatgctccacgtagctgtaacttcacatcatcagcttgcagtttgtaattgactaaagcattccagtgtcctctttctagattgccagctcatgacatggtgcttataaagatttaattaaagtaagaatgaaataaagtttttataattataaca

SEQ ID NO: 139 - protein, 1424 aa, Homo sapiens
MDTTAAAALPAFVLLLSPWPLLGSAQGQFSAGGCTFDDGPGACDYHQDLYDDFEWVHVSAQEPHYLPPEMPQGSYMIVDSSDHDPGEKARLQLPTMKENDTHCIDFSYLKQKQPGTLNILVRVNKGPLANPIWNVTGFTGRDWLRAELAVSTFWPNEYQVIFEAEVSGGRSGYIAIDDIQVLSYPCDKSPHFLRLGDVEVNAGQNATFQCIATGRDAVHNKLWLQRRNGEDIPVAQTKNINHRRFAASFRLQEVTKTDQDLYRCVTQSGSGVSNFAQLIVREPPRPIAPPQLLGVGPTYLLIQLNANSIIGDGPIILKEVEYRMTSGSWTETHAVNAPTYKLWHLDPDTEYEIRVLLWGEGGTGLPGPPLITRTKCAEPMRTPKTLKIAEIQARRIAVDWESLGYNITRCHTFNVTICYHYFRGHNESKADCLDMDPKAPQHVVNHLPPYTNVSLKMILTNPEGRKESEETIIQTDEDVPGPVPVKSLQGTSFENKIFLNWKEPLDPNGIITQYEISYSSIRSFDPAVPVAGPPQTVSNLWNSTHHVFMHLHPGTTYQFFIRASTVKGFGPATAINVTTNISAPTLPDYEGVDASLNETATTITVLLRPAQAKGAPISAYQIVVEELHPHRTKREAGAMECYQVPVTYQNAMSGGAPYYFAAELPPGNLPEPAPFTVGDNRTYQGFWNPPLAPRKGYNIYFQAMSSVEKETKTQCVRIATKAAATEEPEVIPDPAKQTDRVVKIAGISAGILVFILLLLVVILIVKKSKLAKKRKDAMGNTRQEMTHMVNAMDRSYADQSTLHAEDPLSITFMDQHNFSPRYENHSATAESSRLLDVPRYLCEGTESPYQTGQLHPAIRVADLLQHINLMKTSDSYGFKEEYESFFEGQSASWDVAKKDQNRAKNRYGNIIAYDHSRVILQPVEDDPSSDYINANYIDGYQRPSHYIATQGPVHETVYDFWRMIWQEQSACIVMVTNLVEVGRVKCYKYWPDDTEVYGDFKVTCVEMEPLAEYVVRTFTLERRGYNEIREVKQFHFTGWPDHGVPYHATGLLSFIRRVKLSNPPSAGPIVVHCSAGAGRTGCYIVIDIMLDMAEREGVVDIYNCVKALRSRRINMVQTEEQYIFIHDAIACLCGETAIPVCEFKAAYFDMIRIDSQTNSSHLKDEFQTLNSVTPRLQAEDCSIACLPRNHDKNRFMDMLPPDRCLPFLITIDGESSNYINAALMDSYRQPAAFIVTQYPLPNTVKDFWRLVYDYGCTSIVMLNEVDLSQGCPQYWPEEGMLRYGPIQVECMSCSMDCDVINRIFRICNLWQEGYLMVQQFQYLGWASHREVPGSKRSFLKLILQVEKWQEECEEGEGRTIIHCLNGGGRSGMFCAIGIVVEMVKRQNVVDVFHAVKTLRNSKPNMVEAPEQYRFCYDVEYLESS

SEQ ID NO: 140 - DNA, 6249 bp, Homo sapiens
tcttgactaacaggagcagcctccgccgagcatggagagctgccgccgcggccggccggcgacgctggcgacgctttcgcccctgaggtagtttggcgaccgcgaagaaggaaaaagggcgggcgggcggctgtcctctcaccgtcctcaccccgcgaggcccggcccgctcctccgtcgtggatttcgcggcgatccccccggcagctctttgcaaagctgcttgaaacttctcccaaactcggcatggatacgactgcggcggcggcgctgcctgcttttgtggcgctcttgctcctctctccttggcctctcctgggatcggcccaaggccagttctccgcagttttcagtgtctgtgcttgtggtcggtaacttttgctgctgttgttctgctgctgtctgccattccattcgccatctatcacgcacacagaaccctggccaggatcatgaagggcgattgaaaaggtggctgtacttttgatgatggtccaggggcctgtgattaccaccaggatctgtatgatgactttgaatgggtgcatgttagtgctcaagagcctcattatctaccacccgagatgccccaaggttcctatatgatagtggactcttcagatcacgaccctggagaaaaagccagacttcagctgcctacaatgaaggagaacgacactcactgcattgatttcagttacctattatatagccagaaaggactgaatcctggcactttgaacatattagttagggtgaataaaggacctcttgccaatccaatttggaatgtgactggattcacgggtagagattggcttcgggctgagctagcagtgagcaccttttggcccaatgaatatcaggtaatcatctgtacttttctggtgtatgttttgatgtcatcagttctcactatatgtgtaatacatagatgtaaatatgcatctcatggtaatgagagattgccctcttgcctcccccacccccattattggggaagtgtcatacatagatatacatatgcatcccatggagggagaagtggttatattgccattgatgacatccaagtactgagttatccttgtgataaatctcctcatttcctccgtctaggggatgtagaggtgaatgcagggcaaaacgctacatttcagtgcattgccacagggagagatgctgtgcataacaagttatggctccagagacgaaatggagaagatataccagtagcccagactaagaacatcaatcatagaaggtttgccgcttccttcagattgcaagaagtgacaaaaactgaccaggatttgtatcgctgtgtaactcagtcagaacgaggttccggtgtgtccaattttgctcaacttattgtgagagaaccgccaagacccattgctcctcctcagcttcttggtgttgggcctacatatttgctgatccaactaaatgccaactcgatcattggcgatggtcctatcatcctgaaagaagtagagtaccgaatgacatcaggatcctggacagaaacccatgcagtcaatgctccaacttacaaattatggcatttagatccagataccgaatatgagatccgagttctacttacaagacctggtgaaggtggaacggggctcccaggacctccactaatcaccagaacaaaatgtgcagaacctatgagaaccccaaagacattaaagattgctgaaatacaggcaagacggattgctgtggactgggaatccttgggttacaacattacgcgttgccacacttttaatgtcactatctgctaccattacttccgtggtcacaacgagagcaaggcagactgtttggacatggaccccaaagcccctcagcatgttgtgaaccatctgccaccttatacaaatgtcagcctcaagatgatcctaaccaatccagagggaaggaaggagagtgaagagacaattattcaaactgatgaagatgtgcctggtcccgtaccagtaaaatctcttcaaggaacatcctttgaaaataagatcttcttgaactggaaagaacctttggatccaaatggaatcatcactcaatatgagatcagctatagcagtataagatcatttgatcctgcagttccagtggctggacctccccagactgtatcaaatttatggaacagtacacaccatgtctttatgcatctccaccctggaaccacgtaccagtttttcataagagccagcacggtcaaaggctttggtccagccacagccatcaatgtcaccaccaatatctcagctccaactttacctgactatgaaggagttgatgcctctctcaatgaaactgccaccacaataactgtattgttgagaccagcacaagccaaaggtgctcctatcagtgcttatcagattgttgtggaagaactgcacccacaccgaaccaagagagaagccggagccatggaatgctaccaggttcctgtcacataccaaaatgccatgagtgggggtgcaccgtattactttgctgcagaactccccccgggaaacctacctgagcctgccccgttcactgtgggtgacaatcggacctaccaaggcttttggaaccctcctttggctccgcgcaaaggatacaacatctatttccaggcgatgagcagtgtggagaaggaaactaaaacccagtgcgtacgcattgctacaaaagcagcagcaacagaagaaccagaagtgatcccagatcccgccaagcagacagacagagtggtgaaaatagcaggaattagtgctggaattttggtgttcatcctccttctcctagttgtcatattaattgtaaaaaagagcaaacttgctaaaaaacgcaaagatgccatggggaatacccggcaggagatgactcacatggtgaatgcaatggatcgaagttatgctgatcagagcactctgcatgcagaagatcctctttccatcaccttcatggaccaacataactttagtccaagatatgagaaccacagtgctacagcagagtccagtcgccttctagacgtacctcgctacctctgtgaggggacggaatccccttaccagacaggacagctgcatccagccatcagggtagctgatttactgcagcacattaatctcatgaagacatcagacagctatgggttcaaagaggaatatgagagcttttttgaaggacagtcagcatcttgggatgtagctaaaaaagatcaaaatagagcaaaaaaccgatatggaaacattatagcatatgatcactccagagtgattttgcaacccgtagaggatgatccttcctcagattatattaatgccaactatattgatggctaccagagaccaagtcattacattgcaacccaaggtcccgttcatgaaacagtgtatgatttctggaggatgatttggcaagaacaatctgcttgcattgtgatggttacaaatttagttgaggttggccgggttaaatgctataaatattggcctgatgatactgaagtttatggtgacttcaaagtaacgtgtgtagaaatggaaccacttgctgaatatgtagttaggacattcaccctggaaagggtaagtactctaaaattctattttaaaaaggggtacaatgaaatccgtgaagttaaacagttccatttcacgggctggcctgaccatggagtgccctaccatgctacagggctgctttcctttatccggcgagtcaagttatcaaaccctcccagtgctggccccatcgttgtacattgcagtgctggtgctggacgaactggctgctacattgtgattgacatcatgctagacatggctgaaagagagggtgttgttgatatttacaattgtgtcaaagccttaagatctcggcgtattaatatggtccagacagaggaacagtacatttttattcatgatgccattttagaagcctgcttatgtggagaaactgccatacctgtctgtgaatttaaagctgcatattttgatatgattagaatagactcccagactaactcttcacatctcaaggatgaatttcagactctgaattcagtcacccctcgactacaagctgaagactgcagtatagcgtgcctgccaaggaaccatgacaagaaccgtttcatggacatgctgccacctgacagatgtctgccttttttaattacaattgatggggagagcagtaactacatcaatgctgctcttatggacagctacaggcaaccagctgctttcatcgtcacacaataccctctgccaaacactgtaaaagacttctggagattagtgtatgattatggctgtacctccattgtgatgttaaacgaagtcgacttgtcccagggctgccctcagtactggccagaggaagggatgctacgatatggccccatccaagtggaatgtatgtcttgttcaatggactgtgatgtgatcaaccggatttttaggatatgcaatctaacaagaccacaggaaggttatctgatggtgcaacagtttcagtacctaggatgggcttctcatcgagaagtgcctggatccaaaaggtcattcttgaaactgatacttcaggtggaaaagtggcaggaggaatgcgaggaaggggaaggccggacgattatccactgcctaaatggtggcgggcgaagtggcatgttctgtgctataggcatcgttgttgaaatggtgaaacggcaaaatgttgtcgatgttttccatgcagtaaagacactgaggaacagcaagccaaacatggtggaagccccggagcaataccgtttctgctatgatgtagctttggagtacctggaatcatcttagttgggtgagactctttaaagtgcatccatgaagaaacctgtccatctattgagccagcagctgttgtacctgttacacttgtgcagaaagattttaatgtggggggtgggagacttttacatttgagaggtaaaagtattttttttatgaagttgtgtatcttaataaaaaggactgaattagtttttattctatataaagcatcaacatttcatgccacaaacatgccaccttttttctcatggtttcagtagagcagctaccacatgttgcatgagttcatactttctacgtggcatttttctccctttctaaaatgaaagctgatgaatcttaaaaggaagaagaaaagaaaagctgtgcaaattcatagtaaagttcgttttttatatgtttccagtgtagcagatctctatataaatatataaatatatataactggcttattttcttttaatgtgcaatgatggctggatcatttaaagttctttttagaaaataacataagccaaagactcaagtgtaaatatgtctatatggagaaagcacattatatttattggttacttacattccttttttgatggctaaaatactaccaccacacaatcatcttttttttcctgaagaaagctttttctttagctaaaatcaattgtaaacgatttttgtagattattttttgtatgttttagtgtaagtagaagataaactttttattcataaaccaggaagcaatgttctttatagtgattctcttgtgtacatgcttgtgaattaaatttgtgtaaaatcccttggcaattgggtcttttaatataggaccaaattaaaacattttgctgaatatgtatagtttttcacaatttcattaggtaaataatggtttggtgatcatacatgagaaatgtacacattaaaaggccttgctgacaacttgcacaatgttgaacatagcctttaagcatcatttaaattttaaaggaatggagtttttcagcctgtggcccagcactggtcaagaaaacaagatggcaacatatatgctttcagggtcaaatttgagcaaactgtaaactgtcagggtgataaaatgtttctcttgatgtttacatgcacaagctttgcgttctgactataaaaagtgtgaacaaatcaatgccagattcctgttttgcgcattgtcatgggattcttaagtgaacctttctaaatgtggtcttgttcacatgctccacgtagctgtaacttcacatcatcagcttgcagtttgtaattgactaaagcattccagtgtcctctttctagattgccagctcatgacatggtgcttataaagatttaattaaagtaagaatgaaataaagtttttataattataaca

SEQ ID NO: 141 - protein, 1412 aa, Homo sapiens
MPQGSYMIVDSSDHDPGEKARLQLPTMKENDTHCIDFSYLKQKQPGTLNILVRVNKGPLANPIWNVTGFTGRDWLRAELAVSTFWPNEYQVIICTFLVYVLMSSVLTICVIHRCKYASHGNERLPSCLPHPHYWGSVIHRYTYASHGGRSGYIAIDDIQVLSYPCDKSPHFLRLGDVEVNAGQNATFQCIATGRDAVHNKLWLQRRNGEDIPVAQTKNINHRRFAASFRLQEVTKTDQDLYRCVTQSGSGVSNFAQLIVREPPRPIAPPQLLGVGPTYLLIQLNANSIIGDGPIILKEVEYRMTSGSWTETHAVNAPTYKLWHLDPDTEYEIRVLLWGEGGTGLPGPPLITRTKCAEPMRTPKTLKIAEIQARRIAVDWESLGYNITRCHTFNVTICYHYFRGHNESKADCLDMDPKAPQHVVNHLPPYTNVSLKMILTNPEGRKESEETIIQTDEDVPGPVPVKSLQGTSFENKIFLNWKEPLDPNGIITQYEISYSSIRSFDPAVPVAGPPQTVSNLWNSTHHVFMHLHPGTTYQFFIRASTVKGFGPATAINVTTNISAPTLPDYEGVDASLNETATTITVLLRPAQAKGAPISAYQIVVEELHPHRTKREAGAMECYQVPVTYQNAMSGGAPYYFAAELPPGNLPEPAPFTVGDNRTYQGFWNPPLAPRKGYNIYFQAMSSVEKETKTQCVRIATKAAATEEPEVIPDPAKQTDRVVKIAGISAGILVFILLLLVVILIVKKSKLAKKRKDAMGNTRQEMTHMVNAMDRSYADQSTLHAEDPLSITFMDQHNFSPRYENHSATAESSRLLDVPRYLCEGTESPYQTGQLHPAIRVADLLQHINLMKTSDSYGFKEEYESFFEGQSASWDVAKKDQNRAKNRYGNIIAYDHSRVILQPVEDDPSSDYINANYIDGYQRPSHYIATQGPVHETVYDFWRMIWQEQSACIVMVTNLVEVGRVKCYKYWPDDTEVYGDFKVTCVEMEPLAEYVVRTFTLERVSTLKFYFKKGYNEIREVKQFHFTGWPDHGVPYHATGLLSFIRRVKLSNPPSAGPIVVHCSAGAGRTGCYIVIDIMLDMAEREGVVDIYNCVKALRSRRINMVQTEEQYIFIHDAIACLCGETAIPVCEFKAAYFDMIRIDSQTNSSHLKDEFQTLNSVTPRLQAEDCSIACLPRNHDKNRFMDMLPPDRCLPFLITIDGESSNYINAALMDSYRQPAAFIVTQYPLPNTVKDFWRLVYDYGCTSIVMLNEVDLSQGCPQYWPEEGMLRYGPIQVECMSCSMDCDVINRIFRICNLWQEGYLMVQQFQYLGWASHREVPGSKRSFLKLILQVEKWQEECEEGEGRTIIHCLNGGGRSGMFCAIGIVVEMVKRQNVVDVFHAVKTLRNSKPNMVEAPEQYRFCYDVEYLESS

SEQ ID NO: 142 - DNA, 6078 bp, Homo sapiens
tcttgactaacaggagcagcctccgccgagcatggagagctgccgccgcggccggccggcgacgctggcgacgctttcgcccctgaggtagtttggcgaccgcgaagaaggaaaaagggcgggcgggcggctgtcctctcaccgtcctcaccccgcgaggcccggcccgctcctccgtcgtggatttcgcggcgatccccccggcagctctttgcaaagctgcttgaaacttctcccaaactcggcatggatacgactgcggcggcggcgctgcctgcttttgtggcgctcttgctcctctctccttggcctctcctgggatcggcccaaggccagttctccgcagttttcagtgtctgtgcttgtggtcggtaacttttgctgctgttgttctgctgctgtctgccattccattcgccatctatcacgcacacagaaccctggccaggatcatgaagggcgattgaaaaggtggctgtacttttgatgatggtccaggggcctgtgattaccaccaggatctgtatgatgactttgaatgggtgcatgttagtgctcaagagcctcattatctaccacccgagatgccccaaggttcctatatgatagtggactcttcagatcacgaccctggagaaaaagccagacttcagctgcctacaatgaaggagaacgacactcactgcattgatttcagttacctattatatagccagaaaggactgaatcctggcactttgaacatattagttagggtgaataaaggacctcttgccaatccaatttggaatgtgactggattcacgggtagagattggcttcgggctgagctagcagtgagcaccttttggcccaatgaatatcaggtaatatttgaagctgaagtctcaggagggagaagtggttatattgccattgatgacatccaagtactgagttatccttgtgataaatctcctcatttcctccgtctaggggatgtagaggtgaatgcagggcaaaacgctacatttcagtgcattgccacagggagagatgctgtgcataacaagttatggctccagagacgaaatggagaagatataccagtagcccagactaagaacatcaatcatagaaggtttgccgcttccttcagattgcaagaagtgacaaaaactgaccaggatttgtatcgctgtgtaactcagtcagaacgaggttccggtgtgtccaattttgctcaacttattgtgagagaaccgccaagacccattgctcctcctcagcttcttggtgttgggcctacatatttgctgatccaactaaatgccaactcgatcattggcgatggtcctatcatcctgaaagaagtagagtaccgaatgacatcaggatcctggacagaaacccatgcagtcaatgctccaacttacaaattatggcatttagatccagataccgaatatgagatccgagttctacttacaagacctggtgaaggtggaacggggctcccaggacctccactaatcaccagaacaaaatgtgcagaacctatgagaaccccaaagacattaaagattgctgaaatacaggcaagacggattgctgtggactgggaatccttgggttacaacattacgcgttgccacacttttaatgtcactatctgctaccattacttccgtggtcacaacgagagcaaggcagactgtttggacatggaccccaaagcccctcagcatgttgtgaaccatctgccaccttatacaaatgtcagcctcaagatgatcctaaccaatccagagggaaggaaggagagtgaagagacaattattcaaactgatgaagatgtgcctggtcccgtaccagtaaaatctcttcaaggaacatcctttgaaaataagatcttcttgaactggaaagaacctttggatccaaatggaatcatcactcaatatgagatcagctatagcagtataagatcatttgatcctgcagttccagtggctggacctccccagactgtatcaaatttatggaacagtacacaccatgtctttatgcatctccaccctggaaccacgtaccagtttttcataagagccagcacggtcaaaggctttggtccagccacagccatcaatgtcaccaccaatatctcagctccaactttacctgactatgaaggagttgatgcctctctcaatgaaactgccaccacaataactgtattgttgagaccagcacaagccaaaggtgctcctatcagtgcttatcagattgttgtggaagaactgcacccacaccgaaccaagagagaagccggagccatggaatgctaccaggttcctgtcacataccaaaatgccatgagtgggggtgcaccgtattactttgctgcagaactccccccgggaaacctacctgagcctgccccgttcactgtgggtgacaatcggacctaccaaggcttttggaaccctcctttggctccgcgcaaaggatacaacatctatttccaggcgatgagcagtgtggagaaggaaactaaaacccagtgcgtacgcattgctacaaaagcagcagcaacagaagaaccagaagtgatcccagatcccgccaagcagacagacagagtggtgaaaatagcaggaattagtgctggaattttggtgttcatcctccttctcctagttgtcatattaattgtaaaaaagagcaaacttgctaaaaaacgcaaagatgccatggggaatacccggcaggagatgactcacatggtgaatgcaatggatcgaagttatgctgatcagagcactctgcatgcagaagatcctctttccatcaccttcatggaccaacataactttagtccaagatatgagaaccacagtgctacagcagagtccagtcgccttctagacgtacctcgctacctctgtgaggggacggaatccccttaccagacaggacagctgcatccagccatcagggtagctgatttactgcagcacattaatctcatgaagacatcagacagctatgggttcaaagaggaatatgagagcttttttgaaggacagtcagcatcttgggatgtagctaaaaaagatcaaaatagagcaaaaaaccgatatggaaacattatagcatatgatcactccagagtgattttgcaacccgtagaggatgatccttcctcagattatattaatgccaactatattgatggctaccagagaccaagtcattacattgcaacccaaggtcccgttcatgaaacagtgtatgatttctggaggatgatttggcaagaacaatctgcttgcattgtgatggttacaaatttagttgaggttggccgggttaaatgctataaatattggcctgatgatactgaagtttatggtgacttcaaagtaacgtgtgtagaaatggaaccacttgctgaatatgtagttaggacattcaccctggaaaggagggggtacaatgaaatccgtgaagttaaacagttccatttcacgggctggcctgaccatggagtgccctaccatgctacagggctgctttcctttatccggcgagtcaagttatcaaaccctcccagtgctggccccatcgttgtacattgcagtgctggtgctggacgaactggctgctacattgtgattgacatcatgctagacatggctgaaagagagggtgttgttgatatttacaattgtgtcaaagccttaagatctcggcgtattaatatggtccagacagaggaacagtacatttttattcatgatgccattttagaagcctgcttatgtggagaaactgccatacctgtctgtgaatttaaagctgcatattttgatatgattagaatagactcccagactaactcttcacatctcaaggatgaatttcagactctgaattcagtcacccctcgactacaagctgaagactgcagtatagcgtgcctgccaaggaaccatgacaagaaccgtttcatggacatgctgccacctgacagatgtctgccttttttaattacaattgatggggagagcagtaactacatcaatgctgctcttatggacagctacaggcaaccagctgctttcatcgtcacacaataccctctgccaaacactgtaaaagacttctggagattagtgtatgattatggctgtacctccattgtgatgttaaacgaagtcgacttgtcccagggctgccctcagtactggccagaggaagggatgctacgatatggccccatccaagtggaatgtatgtcttgttcaatggactgtgatgtgatcaaccggatttttaggatatgcaatctaacaagaccacaggaaggttatctgatggtgcaacagtttcagtacctaggatgggcttctcatcgagaagtgcctggatccaaaaggtcattcttgaaactgatacttcaggtggaaaagtggcaggaggaatgcgaggaaggggaaggccggacgattatccactgcctaaatggtggcgggcgaagtggcatgttctgtgctataggcatcgttgttgaaatggtgaaacggcaaaatgttgtcgatgttttccatgcagtaaagacactgaggaacagcaagccaaacatggtggaagccccggagcaataccgtttctgctatgatgtagctttggagtacctggaatcatcttagttgggtgagactctttaaagtgcatccatgaagaaacctgtccatctattgagccagcagctgttgtacctgttacacttgtgcagaaagattttaatgtggggggtgggagacttttacatttgagaggtaaaagtattttttttatgaagttgtgtatcttaataaaaaggactgaattagtttttattctatataaagcatcaacatttcatgccacaaacatgccaccttttttctcatggtttcagtagagcagctaccacatgttgcatgagttcatactttctacgtggcatttttctccctttctaaaatgaaagctgatgaatcttaaaaggaagaagaaaagaaaagctgtgcaaattcatagtaaagttcgttttttatatgtttccagtgtagcagatctctatataaatatataaatatatataactggcttattttcttttaatgtgcaatgatggctggatcatttaaagttctttttagaaaataacataagccaaagactcaagtgtaaatatgtctatatggagaaagcacattatatttattggttacttacattccttttttgatggctaaaatactaccaccacacaatcatcttttttttcctgaagaaagctttttctttagctaaaatcaattgtaaacgatttttgtagattattttttgtatgttttagtgtaagtagaagataaactttttattcataaaccaggaagcaatgttctttatagtgattctcttgtgtacatgcttgtgaattaaatttgtgtaaaatcccttggcaattgggtcttttaatataggaccaaattaaaacattttgctgaatatgtatagtttttcacaatttcattaggtaaataatggtttggtgatcatacatgagaaatgtacacattaaaaggccttgctgacaacttgcacaatgttgaacatagcctttaagcatcatttaaattttaaaggaatggagtttttcagcctgtggcccagcactggtcaagaaaacaagatggcaacatatatgctttcagggtcaaatttgagcaaactgtaaactgtcagggtgataaaatgtttctcttgatgtttacatgcacaagctttgcgttctgactataaaaagtgtgaacaaatcaatgccagattcctgttttgcgcattgtcatgggattcttaagtgaacctttctaaatgtggtcttgttcacatgctccacgtagctgtaacttcacatcatcagcttgcagtttgtaattgactaaagcattccagtgtcctctttctagattgccagctcatgacatggtgcttataaagatttaattaaagtaagaatgaaataaagtttttataattataaca

SEQ ID NO: 143 - protein, 1355 aa, Homo sapiens
MPQGSYMIVDSSDHDPGEKARLQLPTMKENDTHCIDFSYLKQKQPGTLNILVRVNKGPLANPIWNVTGFTGRDWLRAELAVSTFWPNEYQVIFEAEVSGGRSGYIAIDDIQVLSYPCDKSPHFLRLGDVEVNAGQNATFQCIATGRDAVHNKLWLQRRNGEDIPVAQTKNINHRRFAASFRLQEVTKTDQDLYRCVTQSGSGVSNFAQLIVREPPRPIAPPQLLGVGPTYLLIQLNANSIIGDGPIILKEVEYRMTSGSWTETHAVNAPTYKLWHLDPDTEYEIRVLLWGEGGTGLPGPPLITRTKCAEPMRTPKTLKIAEIQARRIAVDWESLGYNITRCHTFNVTICYHYFRGHNESKADCLDMDPKAPQHVVNHLPPYTNVSLKMILTNPEGRKESEETIIQTDEDVPGPVPVKSLQGTSFENKIFLNWKEPLDPNGIITQYEISYSSIRSFDPAVPVAGPPQTVSNLWNSTHHVFMHLHPGTTYQFFIRASTVKGFGPATAINVTTNISAPTLPDYEGVDASLNETATTITVLLRPAQAKGAPISAYQIVVEELHPHRTKREAGAMECYQVPVTYQNAMSGGAPYYFAAELPPGNLPEPAPFTVGDNRTYQGFWNPPLAPRKGYNIYFQAMSSVEKETKTQCVRIATKAAATEEPEVIPDPAKQTDRVVKIAGISAGILVFILLLLVVILIVKKSKLAKKRKDAMGNTRQEMTHMVNAMDRSYADQSTLHAEDPLSITFMDQHNFSPRYENHSATAESSRLLDVPRYLCEGTESPYQTGQLHPAIRVADLLQHINLMKTSDSYGFKEEYESFFEGQSASWDVAKKDQNRAKNRYGNIIAYDHSRVILQPVEDDPSSDYINANYIDGYQRPSHYIATQGPVHETVYDFWRMIWQEQSACIVMVTNLVEVGRVKCYKYWPDDTEVYGDFKVTCVEMEPLAEYVVRTFTLERRGYNEIREVKQFHFTGWPDHGVPYHATGLLSFIRRVKLSNPPSAGPIVVHCSAGAGRTGCYIVIDIMLDMAEREGVVDIYNCVKALRSRRINMVQTEEQYIFIHDAIACLCGETAIPVCEFKAAYFDMIRIDSQTNSSHLKDEFQTLNSVTPRLQAEDCSIACLPRNHDKNRFMDMLPPDRCLPFLITIDGESSNYINAALMDSYRQPAAFIVTQYPLPNTVKDFWRLVYDYGCTSIVMLNEVDLSQGCPQYWPEEGMLRYGPIQVECMSCSMDCDVINRIFRICNLWQEGYLMVQQFQYLGWASHREVPGSKRSFLKLILQVEKWQEECEEGEGRTIIHCLNGGGRSGMFCAIGIVVEMVKRQNVVDVFHAVKTLRNSKPNMVEAPEQYRFCYDVEYLESS

SEQ ID NO: 144 - DNA, 1286 bp, Homo sapiens
tcttgactaacaggagcagcctccgccgagcatggagagctgccgccgcggccggccggcgacgctggcgacgctttcgcccctgaggtagtttggcgaccgcgaagaaggaaaaagggcgggcgggcggctgtcctctcaccgtcctcaccccgcgaggcccggcccgctcctccgtcgtggatttcgcggcgatccccccggcagctctttgcaaagctgcttgaaacttctcccaaactcggcatggatacgactgcggcggcggcgctgcctgcttttgtggcgctcttgctcctctctccttggcctctcctgggatcggcccaaggccagttctccgcagttttcagtgtctgtgcttgtggtcggtaacttttgctgctgttgttctgctgctgtctgccattccattcgccatctatcacgcacacagaaccctggccaggatcatgaagggcgattgaaaaggtggctgtacttttgatgatggtccaggggcctgtgattaccaccaggatctgtatgatgactttgaatgggtgcatgttagtgctcaagagcctcattatctaccacccgagatgccccaaggttcctatatgatagtggactcttcagatcacgaccctggagaaaaagccagacttcagctgcctacaatgaaggagaacgacactcactgcattgatttcagttacctattatatagccagaaaggactgaatcctggcactttgaacatattagttagggtgaataaaggacctcttgccaatccaatttggaatgtgactggattcacgggtagagattggcttcgggctgagctagcagtgagcaccttttggcccaatgaatatcaggtaatatttgaagctgaagtctcaggagggagaagtggttatattgccattgatgacatccaagtactgagttatccttgtgataaatctcctcatttcctccgtctaggggatgtagaggtgaatgcagggcaaaacgctacatttcagtgcattgccacagggagagatgctgtgcataacaagttatggctccagagacgaaatggagaagatataccagtagcccagactaagaacatcaatcatagaaggtttgccgcttccttcagattgcaagaagtgacaaaaactgaccaggatttgtatcgctgtgtaactcagtcagaacgaggttccggtgtgtccaattttgctcaacttattgtgagaggtaaggtgaaattgttttcacttcacgaaattgcatggctttattag

SEQ ID NO: 145 - protein, 227 aa, Homo sapiens
MPQGSYMIVDSSDHDPGEKARLQLPTMKENDTHCIDFSYLKQKQPGTLNILVRVNKGPLANPIWNVTGFTGRDWLRAELAVSTFWPNEYQVIFEAEVSGGRSGYIAIDDIQVLSYPCDKSPHFLRLGDVEVNAGQNATFQCIATGRDAVHNKLWLQRRNGEDIPVAQTKNINHRRFAASFRLQEVTKTDQDLYRCVTQSGSGVSNFAQLIVRGKVKLFSLHEIAWLY

SEQ ID NO: 146 - DNA, 5008 bp, Homo sapiens
tcttgactaacaggagcagcctccgccgagcatggagagctgccgccgcggccggccggcgacgctggcgacgctttcgcccctgaggtagtttggcgaccgcgaagaaggaaaaagggcgggcgggcggctgtcctctcaccgtcctcaccccgcgaggcccggcccgctcctccgtcgtggatttcgcggcgatccccccggcagctctttgcaaagctgcttgaaacttctcccaaactcggcatggatacgactgcggcggcggcgctgcctgcttttgtggcgctcttgctcctctctccttggcctctcctgggatcggcccaaggccagttctccgcagttttcagtgtctgtgcttgtggtcggtaacttttgctgctgttgttctgctgctgtctgccattccattcgccatctatcacgcacacagaaccctggccaggatcatgaagggcgattgaaaaggtggctgtacttttgatgatggtccaggggcctgtgattaccaccaggatctgtatgatgactttgaatgggtgcatgttagtgctcaagagcctcattatctaccacccgagatgccccaaggttcctatatgatagtggactcttcagatcacgaccctggagaaaaagccagacttcagctgcctacaatgaaggagaacgacactcactgcattgatttcagttacctattatatagccagaaaggactgaatcctggcactttgaacatattagttagggtgaataaaggacctcttgccaatccaatttggaatgtgactggattcacgggtagagattggcttcgggctgagctagcagtgagcaccttttggcccaatgaatatcaggtaatcatctgtacttttctggtgtatgttttgatgtcatcagttctcactatatgtgtaatacatagatgtaaatatgcatctcatggtaatgagagattgccctcttgcctcccccacccccattattggggaagtgtcatacatagatatacatatgcatcccatggagggagaagtggttatattgccattgatgacatccaagtactgagttatccttgtgataaatctcctcatttcctccgtctaggggatgtagaggtgaatgcagggcaaaacgctacatttcagtgcattgccacagggagagatgctgtgcataacaagttatggctccagagacgaaatggagaagatataccagtagcccagactaagaacatcaatcatagaaggtttgccgcttccttcagattgcaagaagtgacaaaaactgaccaggatttgtatcgctgtgtaactcagtcagaacgaggttccggtgtgtccaattttgctcaacttattgtgagagaaccgccaagacccattgctcctcctcagcttcttggtgttgggcctacatatttgctgatccaactaaatgccaactcgatcattggcgatggtcctatcatcctgaaagaagtagagtaccgaatgacatcaggatcctggacagaaacccatgcagtcaatgctccaacttacaaattatggcatttagatccagataccgaatatgagatccgagttctacttacaagacctggtgaaggtggaacggggctcccaggacctccactaatcaccagaacaaaatgtgcagaacctatgagaaccccaaagacattaaagattgctgaaatacaggcaagacggattgctgtggactgggaatccttgggttacaacattacgcgttgccacacttttaatgtcactatctgctaccattacttccgtggtcacaacgagagcaaggcagactgtttggacatggaccccaaagcccctcagcatgttgtgaaccatctgccaccttatacaaatgtcagcctcaagatgatcctaaccaatccagagggaaggaaggagagtgaagagacaattattcaaactgatgaagatgtgcctggtcccgtaccagtaaaatctcttcaaggaacatcctttgaaaataagatcttcttgaactggaaagaacctttggatccaaatggaatcatcactcaatatgagatcagctatagcagtataagatcatttgatcctgcagttccagtggctggacctccccagactgtatcaaatttatggaacagtacacaccatgtctttatgcatctccaccctggaaccacgtaccagtttttcataagagccagcacggtcaaaggctttggtccagccacagccatcaatgtcaccaccaatatctcagctccaactttacctgactatgaaggagttgatgcctctctcaatgaaactgccaccacaataactgtattgttgagaccagcacaagccaaaggtgctcctatcagtgcttatcagattgttgtggaagaactgcacccacaccgaaccaagagagaagccggagccatggaatgctaccaggttcctgtcacataccaaaatgccatgagtgggggtgcaccgtattactttgctgcagaactccccccgggaaacctacctgagcctgccccgttcactgtgggtgacaatcggacctaccaaggcttttggaaccctcctttggctccgcgcaaaggatacaacatctatttccaggcgatgagcagtgtggagaaggaaactaaaacccagtgcgtacgcattgctacaaaagcagcagcaacagaagaaccagaagtgatcccagatcccgccaagcagacagacagagtggtgaaaatagcaggaattagtgctggaattttggtgttcatcctccttctcctagttgtcatattaattgtaaaaaagagcaaacttgctaaaaaacgcaaagatgccatggggaatacccggcaggagatgactcacatggtgaatgcaatggatcgaagttatgctgatcagagcactctgcatgcagaagatcctctttccatcaccttcatggaccaacataactttagtccaagatatgagaaccacagtgctacagcagagtccagtcgccttctagacgtacctcgctacctctgtgaggggacggaatccccttaccagacaggacagctgcatccagccatcagggtagctgatttactgcagcacattaatctcatgaagacatcagacagctatgggttcaaagaggaatatgagagcttttttgaaggacagtcagcatcttgggatgtagctaaaaaagatcaaaatagagcaaaaaaccgatatggaaacattatagcatattatattaatgccaactatattgatggctaccagagaccaagtcattacattgcaacccaaggtcccgttcatgaaacagtgtatgatttctggaggatgatttggcaagaacaatctgcttgcattgtgatggttacaaatttagttgaggttggccgggttaaatgctataaatattggcctgatgatactgaagtttatggtgacttcaaagtaacgtgtgtagaaatggaaccacttgctgaatatgtagttaggacattcaccctggaaaggagggggtacaatgaaatccgtgaagttaaacagttccatttcacgggctggcctgaccatggagtgccctaccatgctacagggctgctttcctttatccggcgagtcaagttatcaaaccctcccagtgctggccccatcgttgtacattgcagtgctggtgctggacgaactggctgctacattgtgattgacatcatgctagacatggctgaaagagagggtgttgttgatatttacaattgtgtcaaagccttaagatctcggcgtattaatatggtccagacagaggaacagtacatttttattcatgatgccattttagaagcctgcttatgtggagaaactgccatacctgtctgtgaatttaaagctgcatattttgatatgattagaatagactcccagactaactcttcacatctcaaggatgaatttcagactctgaattcagtcacccctcgactacaagctgaagactgcagtatagcgtgcctgccaaggaaccatgacaagaaccgtttcatggacatgctgccacctgacagatgtctgccttttttaattacaattgatggggagagcagtaactacatcaatgctgctcttatggacagctacaggcaaccagctgctttcatcgtcacacaataccctctgccaaacactgtaaaagacttctggagattagtgtatgattatggctgtacctccattgtgatgttaaacgaagtcgacttgtcccagggctgccctcagtactggccagaggaagggatgctacgatatggccccatccaagtggaatgtatgtcttgttcaatggactgtgatgtgatcaaccggatttttaggatatgcaatctaacaagaccacaggaaggttatctgatggtgcaacagtttcagtacctaggatgggcttctcatcgagaagtgcctggatccaaaaggtcattcttgaaactgatacttcaggtggaaaagtggcaggaggaatgcgaggaaggggaaggccggacgattatccactgcctaaatggtggcgggcgaagtggcatgttctgtgctataggcatcgttgttgaaatggtgaaacggcaaaatgttgtcgatgttttccatgcagtaaagacactgaggaacagcaagccaaacatggtggaagccccggagcaataccgtttctgctatgatgtagctttggagtacctggaatcatcttagttgggtgagactctttaaagtgcatccatgaagaaacctgtccatctattgagccagcagctgttgtacctgttacacttgtgcagaaagattttaatgtggggggtgggagacttttacatttgagaggtaaaagtattttttttatgaagttgtgtatcttaataaaaaggactgaattagtttttattctatataaagcatcaacatttcatgccaca

SEQ ID NO: 147 - protein, 1386 aa, Homo sapiens
MPQGSYMIVDSSDHDPGEKARLQLPTMKENDTHCIDFSYLKQKQPGTLNILVRVNKGPLANPIWNVTGFTGRDWLRAELAVSTFWPNEYQVIICTFLVYVLMSSVLTICVIHRCKYASHGNERLPSCLPHPHYWGSVIHRYTYASHGGRSGYIAIDDIQVLSYPCDKSPHFLRLGDVEVNAGQNATFQCIATGRDAVHNKLWLQRRNGEDIPVAQTKNINHRRFAASFRLQEVTKTDQDLYRCVTQSGSGVSNFAQLIVREPPRPIAPPQLLGVGPTYLLIQLNANSIIGDGPIILKEVEYRMTSGSWTETHAVNAPTYKLWHLDPDTEYEIRVLLWGEGGTGLPGPPLITRTKCAEPMRTPKTLKIAEIQARRIAVDWESLGYNITRCHTFNVTICYHYFRGHNESKADCLDMDPKAPQHVVNHLPPYTNVSLKMILTNPEGRKESEETIIQTDEDVPGPVPVKSLQGTSFENKIFLNWKEPLDPNGIITQYEISYSSIRSFDPAVPVAGPPQTVSNLWNSTHHVFMHLHPGTTYQFFIRASTVKGFGPATAINVTTNISAPTLPDYEGVDASLNETATTITVLLRPAQAKGAPISAYQIVVEELHPHRTKREAGAMECYQVPVTYQNAMSGGAPYYFAAELPPGNLPEPAPFTVGDNRTYQGFWNPPLAPRKGYNIYFQAMSSVEKETKTQCVRIATKAAATEEPEVIPDPAKQTDRVVKIAGISAGILVFILLLLVVILIVKKSKLAKKRKDAMGNTRQEMTHMVNAMDRSYADQSTLHAEDPLSITFMDQHNFSPRYENHSATAESSRLLDVPRYLCEGTESPYQTGQLHPAIRVADLLQHINLMKTSDSYGFKEEYESFFEGQSASWDVAKKDQNRAKNRYGNIIAYYINANYIDGYQRPSHYIATQGPVHETVYDFWRMIWQEQSACIVMVTNLVEVGRVKCYKYWPDDTEVYGDFKVTCVEMEPLAEYVVRTFTLERRGYNEIREVKQFHFTGWPDHGVPYHATGLLSFIRRVKLSNPPSAGPIVVHCSAGAGRTGCYIVIDIMLDMAEREGVVDIYNCVKALRSRRINMVQTEEQYIFIHDAIACLCGETAIPVCEFKAAYFDMIRIDSQTNSSHLKDEFQTLNSVTPRLQAEDCSIACLPRNHDKNRFMDMLPPDRCLPFLITIDGESSNYINAALMDSYRQPAAFIVTQYPLPNTVKDFWRLVYDYGCTSIVMLNEVDLSQGCPQYWPEEGMLRYGPIQVECMSCSMDCDVINRIFRICNLWQEGYLMVQQFQYLGWASHREVPGSKRSFLKLILQVEKWQEECEEGEGRTIIHCLNGGGRSGMFCAIGIVVEMVKRQNVVDVFHAVKTLRNSKPNMVEAPEQYRFCYDVEYLESS

SEQ ID NO: 148 - DNA, 6132 bp, Homo sapiens
tcttgactaacaggagcagcctccgccgagcatggagagctgccgccgcggccggccggcgacgctggcgacgctttcgcccctgaggtagtttggcgaccgcgaagaaggaaaaagggcgggcgggcggctgtcctctcaccgtcctcaccccgcgaggcccggcccgctcctccgtcgtggatttcgcggcgatccccccggcagctctttgcaaagctgcttgaaacttctcccaaactcggcatggatacgactgcggcggcggcgctgcctgcttttgtggcgctcttgctcctctctccttggcctctcctgggatcggcccaaggccagttctccgcagttttcagtgtctgtgcttgtggtcggtaacttttgctgctgttgttctgctgctgtctgccattccattcgccatctatcacgcacacagaaccctggccaggatcatgaagggcgattgaaaaggtggctgtacttttgatgatggtccaggggcctgtgattaccaccaggatctgtatgatgactttgaatgggtgcatgttagtgctcaagagcctcattatctaccacccgagatgccccaaggttcctatatgatagtggactcttcagatcacgaccctggagaaaaagccagacttcagctgcctacaatgaaggagaacgacactcactgcattgatttcagttacctattatatagccagaaaggactgaatcctggcactttgaacatattagttagggtgaataaaggacctcttgccaatccaatttggaatgtgactggattcacgggtagagattggcttcgggctgagctagcagtgagcaccttttggcccaatgaatatcaggtaatatttgaagctgaagtctcaggagggagaagtggttatattgccattgatgacatccaagtactgagttatccttgtgataaatctcctcatttcctccgtctaggggatgtagaggtgaatgcagggcaaaacgctacatttcagtgcattgccacagggagagatgctgtgcataacaagttatggctccagagacgaaatggagaagatataccagtagcccagactaagaacatcaatcatagaaggtttgccgcttccttcagattgcaagaagtgacaaaaactgaccaggatttgtatcgctgtgtaactcagtcagaacgaggttccggtgtgtccaattttgctcaacttattgtgagagaaccgccaagacccattgctcctcctcagcttcttggtgttgggcctacatatttgctgatccaactaaatgccaactcgatcattggcgatggtcctatcatcctgaaagaagtagagtaccgaatgacatcaggatcctggacagaaacccatgcagtcaatgctccaacttacaaattatggcatttagatccagataccgaatatgagatccgagttctacttacaagacctggtgaaggtggaacggggctcccaggacctccactaatcaccagaacaaaatgtgcagaacctatgagaaccccaaagacattaaagattgctgaaatacaggcaagacggattgctgtggactgggaatccttgggttacaacattacgcgttgccacacttttaatgtcactatctgctaccattacttccgtggtcacaacgagagcaaggcagactgtttggacatggaccccaaagcccctcagcatgttgtgaaccatctgccaccttatacaaatgtcagcctcaagatgatcctaaccaatccagagggaaggaaggagagtgaagagacaattattcaaactgatgaagatgtgcctggtcccgtaccagtaaaatctcttcaaggaacatcctttgaaaataagatcttcttgaactggaaagaacctttggatccaaatggaatcatcactcaatatgagatcagctatagcagtataagatcatttgatcctgcagttccagtggctggacctccccagactgtatcaaatttatggaacagtacacaccatgtctttatgcatctccaccctggaaccacgtaccagtttttcataagagccagcacggtcaaaggctttggtccagccacagccatcaatgtcaccaccaatatctcagctccaactttacctgactatgaaggagttgatgcctctctcaatgaaactgccaccacaataactgtattgttgagaccagcacaagccaaaggtgctcctatcagtgcttatcagattgttgtggaagaactgcacccacaccgaaccaagagagaagccggagccatggaatgctaccaggttcctgtcacataccaaaatgccatgagtgggggtgcaccgtattactttgctgcagaactccccccgggaaacctacctgagcctgccccgttcactgtgggtgacaatcggacctaccaaggcttttggaaccctcctttggctccgcgcaaaggatacaacatctatttccaggcgatgagcagtgtggagaaggaaactaaaacccagtgcgtacgcattgctacaaaagcagcagcaacagaagaaccagaagtgatcccagatcccgccaagcagacagacagagtggtgaaaatagcaggaattagtgctggaattttggtgttcatcctccttctcctagttgtcatattaattgtaaaaaagagcaaacttgctaaaaaacgcaaagatgccatggggaatacccggcaggagatgactcacatggtgaatgcaatggatcgaagttatgctgatcagagcactctgcatgcagaagatcctctttccatcaccttcatggaccaacataactttagtccaagattgcccaatgatccacttgtaccgactgctgtgttagatgagaaccacagtgctacagcagagtccagtcgccttctagacgtacctcgctacctctgtgaggggacggaatccccttaccagacaggacagctgcatccagccatcagggtagctgatttactgcagcacattaatctcatgaagacatcagacagctatgggttcaaagaggaatatgagagcttttttgaaggacagtcagcatcttgggatgtagctaaaaaagatcaaaatagagcaaaaaaccgatatggaaacattatagcatatgatcactccagagtgattttgcaacccgtagaggatgatccttcctcagattatattaatgccaactatattgatatttggctgtacagggatggctaccagagaccaagtcattacattgcaacccaaggtcccgttcatgaaacagtgtatgatttctggaggatgatttggcaagaacaatctgcttgcattgtgatggttacaaatttagttgaggttggccgggttaaatgctataaatattggcctgatgatactgaagtttatggtgacttcaaagtaacgtgtgtagaaatggaaccacttgctgaatatgtagttaggacattcaccctggaaaggagggggtacaatgaaatccgtgaagttaaacagttccatttcacgggctggcctgaccatggagtgccctaccatgctacagggctgctttcctttatccggcgagtcaagttatcaaaccctcccagtgctggccccatcgttgtacattgcagtgctggtgctggacgaactggctgctacattgtgattgacatcatgctagacatggctgaaagagagggtgttgttgatatttacaattgtgtcaaagccttaagatctcggcgtattaatatggtccagacagaggaacagtacatttttattcatgatgccattttagaagcctgcttatgtggagaaactgccatacctgtctgtgaatttaaagctgcatattttgatatgattagaatagactcccagactaactcttcacatctcaaggatgaatttcagactctgaattcagtcacccctcgactacaagctgaagactgcagtatagcgtgcctgccaaggaaccatgacaagaaccgtttcatggacatgctgccacctgacagatgtctgccttttttaattacaattgatggggagagcagtaactacatcaatgctgctcttatggacagctacaggcaaccagctgctttcatcgtcacacaataccctctgccaaacactgtaaaagacttctggagattagtgtatgattatggctgtacctccattgtgatgttaaacgaagtcgacttgtcccagggctgccctcagtactggccagaggaagggatgctacgatatggccccatccaagtggaatgtatgtcttgttcaatggactgtgatgtgatcaaccggatttttaggatatgcaatctaacaagaccacaggaaggttatctgatggtgcaacagtttcagtacctaggatgggcttctcatcgagaagtgcctggatccaaaaggtcattcttgaaactgatacttcaggtggaaaagtggcaggaggaatgcgaggaaggggaaggccggacgattatccactgcctaaatggtggcgggcgaagtggcatgttctgtgctataggcatcgttgttgaaatggtgaaacggcaaaatgttgtcgatgttttccatgcagtaaagacactgaggaacagcaagccaaacatggtggaagccccggagcaataccgtttctgctatgatgtagctttggagtacctggaatcatcttagttgggtgagactctttaaagtgcatccatgaagaaacctgtccatctattgagccagcagctgttgtacctgttacacttgtgcagaaagattttaatgtggggggtgggagacttttacatttgagaggtaaaagtattttttttatgaagttgtgtatcttaataaaaaggactgaattagtttttattctatataaagcatcaacatttcatgccacaaacatgccaccttttttctcatggtttcagtagagcagctaccacatgttgcatgagttcatactttctacgtggcatttttctccctttctaaaatgaaagctgatgaatcttaaaaggaagaagaaaagaaaagctgtgcaaattcatagtaaagttcgttttttatatgtttccagtgtagcagatctctatataaatatataaatatatataactggcttattttcttttaatgtgcaatgatggctggatcatttaaagttctttttagaaaataacataagccaaagactcaagtgtaaatatgtctatatggagaaagcacattatatttattggttacttacattccttttttgatggctaaaatactaccaccacacaatcatcttttttttcctgaagaaagctttttctttagctaaaatcaattgtaaacgatttttgtagattattttttgtatgttttagtgtaagtagaagataaactttttattcataaaccaggaagcaatgttctttatagtgattctcttgtgtacatgcttgtgaattaaatttgtgtaaaatcccttggcaattgggtcttttaatataggaccaaattaaaacattttgctgaatatgtatagtttttcacaatttcattaggtaaataatggtttggtgatcatacatgagaaatgtacacattaaaaggccttgctgacaacttgcacaatgttgaacatagcctttaagcatcatttaaattttaaaggaatggagtttttcagcctgtggcccagcactggtcaagaaaacaagatggcaacatatatgctttcagggtcaaatttgagcaaactgtaaactgtcagggtgataaaatgtttctcttgatgtttacatgcacaagctttgcgttctgactataaaaagtgtgaacaaatcaatgccagattcctgttttgcgcattgtcatgggattcttaagtgaacctttctaaatgtggtcttgttcacatgctccacgtagctgtaacttcacatcatcagcttgcagtttgtaattgactaaagcattccagtgtcctctttctagattgccagctcatgacatggtgcttataaagatttaattaaagtaagaatgaaataaagtttttataattataaca

SEQ ID NO: 149 - protein, 1373 aa, Homo sapiens
MPQGSYMIVDSSDHDPGEKARLQLPTMKENDTHCIDFSYLKQKQPGTLNILVRVNKGPLANPIWNVTGFTGRDWLRAELAVSTFWPNEYQVIFEAEVSGGRSGYIAIDDIQVLSYPCDKSPHFLRLGDVEVNAGQNATFQCIATGRDAVHNKLWLQRRNGEDIPVAQTKNINHRRFAASFRLQEVTKTDQDLYRCVTQSGSGVSNFAQLIVREPPRPIAPPQLLGVGPTYLLIQLNANSIIGDGPIILKEVEYRMTSGSWTETHAVNAPTYKLWHLDPDTEYEIRVLLWGEGGTGLPGPPLITRTKCAEPMRTPKTLKIAEIQARRIAVDWESLGYNITRCHTFNVTICYHYFRGHNESKADCLDMDPKAPQHVVNHLPPYTNVSLKMILTNPEGRKESEETIIQTDEDVPGPVPVKSLQGTSFENKIFLNWKEPLDPNGIITQYEISYSSIRSFDPAVPVAGPPQTVSNLWNSTHHVFMHLHPGTTYQFFIRASTVKGFGPATAINVTTNISAPTLPDYEGVDASLNETATTITVLLRPAQAKGAPISAYQIVVEELHPHRTKREAGAMECYQVPVTYQNAMSGGAPYYFAAELPPGNLPEPAPFTVGDNRTYQGFWNPPLAPRKGYNIYFQAMSSVEKETKTQCVRIATKAAATEEPEVIPDPAKQTDRVVKIAGISAGILVFILLLLVVILIVKKSKLAKKRKDAMGNTRQEMTHMVNAMDRSYADQSTLHAEDPLSITFMDQHNFSPRLPNDPLVPTAVLDENHSATAESSRLLDVPRYLCEGTESPYQTGQLHPAIRVADLLQHINLMKTSDSYGFKEEYESFFEGQSASWDVAKKDQNRAKNRYGNIIAYDHSRVILQPVEDDPSSDYINANYIDIWLYRDGYQRPSHYIATQGPVHETVYDFWRMIWQEQSACIVMVTNLVEVGRVKCYKYWPDDTEVYGDFKVTCVEMEPLAEYVVRTFTLERRGYNEIREVKQFHFTGWPDHGVPYHATGLLSFIRRVKLSNPPSAGPIVVHCSAGAGRTGCYIVIDIMLDMAEREGVVDIYNCVKALRSRRINMVQTEEQYIFIHDAIACLCGETAIPVCEFKAAYFDMIRIDSQTNSSHLKDEFQTLNSVTPRLQAEDCSIACLPRNHDKNRFMDMLPPDRCLPFLITIDGESSNYINAALMDSYRQPAAFIVTQYPLPNTVKDFWRLVYDYGCTSIVMLNEVDLSQGCPQYWPEEGMLRYGPIQVECMSCSMDCDVINRIFRICNLWQEGYLMVQQFQYLGWASHREVPGSKRSFLKLILQVEKWQEECEEGEGRTIIHCLNGGGRSGMFCAIGIVVEMVKRQNVVDVFHAVKTLRNSKPNMVEAPEQYRFCYDVEYLESS

SEQ ID NO: 150 - DNA, 37781 bp, Mus musculus
  misc_feature (1)...(37781): n = A,T,C or G
tgtctttttcagttgctctctaccttattttttgaggcagagtctcttactgaaccagaggttagctcatctggctataccgagtgactaaggaaagccctgggattctcctgtcgttgcctcccaggtgctaggattacaagctctggccatcatactcaattttaaaaaaaggatgtgagttctagggtgttagattcagatgccacaggcaggcaggcaggcaggcaggcaggcaggcaggcaggcaggcaggcaggcaggcaggcaggcaggcagacaggcaagcaggcaggcaggcaggcaggcaggcaggcaggcaggcaggcaggcaggcaggcaggcaggcaggcaggcaggcaggcaagcagacaggcaggcaggcaggcaagcagacaggcaagcaggcagacaggcaaggctgcacactaccctgcagattcacctccagagtgctgatgagaggcacgggagtgtcgggctcccgagtacaggccaggcgcggtaggttctttaccaactagcatttccccggtcccaagattttaacattctttcacttagagtaaactaaatctttgaaccagcttactttctaataaactagttttctgaagtcgttctttcttggcattgggaacttcacctagaattctgcacacgctcactttgccagtgagcggaatttctcctctctttcagacaaggaaggtctcacgaaattgctccggctggtcttgaactcactgtagcacaacaggccttgaatactctgcccttcgacctcagcctcacaaatagggttacaacctacatcatcaggttcctctacgcaaacattatttttatttacatgcctgtgtgtgtgtgtgtgtgtgtgtgtgtgtgtgtgtgaacatatgcgccatgtgtgcaggtgttagcacaggccacaggggagtgccagatttcctggaactggaattacagagagttgtgagctgcctgacatgggtgctagggaccaaactttggtctgaaagagctgcagatgctctttacccagtgagctctctttccagccacatcctatatcctttaacattgtacaatcctgtaccttaagcagggtgnnnnnnnnnnnnnnnnnnnntattttttgaggcagtgtctcttactgaaccagaggttggctcatctggctataccgagtaactaaggaaagccctgggattctcctgttgttgcctcccaggtactagaattacaagctctggccatcatactcaatttttaaaaaaggatgtgagttctagggtgttagattcagatgccacaggcaggcaggcaggcaggcaggcaggcaggcaggcaggcaggcaggcaggcaggcaggcaggcaggcaggcaggcaagcagacaggcaggcaggcaggcagggctgcacaccaccctgcagattcacctccagagtgctgatgagagtcacctgagtgacgggctcccgagtacaggccaggcgaggtaggttctttaccaactagcatttccccggtcccaagattttaacattctttcacttagagtaaactaaatctttgaaccagcttactttctaataaactagttttctgaagtcgttctttcttggcattgggaacttcacctagaattctgcacacgctcactttgccagtgagctgaatttctcctctctttcagacaaggtctcacgaaattgctccggctggtcttgaactcactgtagcacaacaggccttgaatactctgcccttcgacctcagcctcacaaatagggttacaacctacatcatcaggttcctctatgcaaacattatttttatttacatgcctctgtgtgtgtgtgtgtgtgtgtgtgaacatatgcgccatgtgtgcaggtgttagcacaggccacaggggagtgccagatttcctggaactggaattacagagagttgtgagctgcctgacatgggtgctagggaccaaactttggtctgaaagagctgcagatgctctttacccagtgagctctctttccagccacatcctctatcctttaacattgtacaatcctgtaccttaagcagggggtagtggagcacaccttcaaacccagcacttcggaggcagaggcaggcagatctctgtgagtttgagaccagcctggtctatagagggagttctataacagctagggttacacagagaaaccctgactccaaaaaacaaagcgaacttctctgccttaacattctacagttttagctgggactagtggtacatttgataggtggaggcagggggattatgaactcaaggtcagtctttaaataaaacctgcctcaaataaatatacaaaaccaaaaataattataatactttctgtgaggaaatattgttcaataatcatttttctttccttctctctcctctcccccccccatctttcttttttaagacaggatttctctatatagccttggctgtcctggactttgctctatagaccaggttggcctcaatcttagagatcctcctgcctctgcctccccagtgctgggattataagcatgcgccacctggctataattattttctatattatttcattattttatctactaacattccagaataatattttaggaggaatattactttttttgttggtggtggtttttttgtttttgtttttttgagacagggtttttctgtgtagccctggctgacctggaactcactttgtacaccaggctgggctcgaactcagaaatctgcctgcctctgcctcccgagtgctgggattaaaggcatgtgccactacacccggcttggaatattacttaataattattgttttccacactgattttgtgccttgacatcctgtaactgtgttcaacattatccagtactttttcctactatgattttctttatatcctgcagttttcttttcatttatgtaaatgtgaatttatgccatacgtgtgtgacgttcagaggacagaaagaggtgtcagatcctctaacgctggagctacaggtggttgtgaagttgtgggctaccgtgtgggtgctaggaaataaacttggaacttggaagagcaacaaacgctcttaactaccgagccacctccagtctctatattctgcaattttgtattcccaatgtcttaaagcccctgaacaggaatattatttaataatagtaattacatcattttttctgcattctatgacttttgatcctccagggggcaacactgttcccttaagaagcagtctttgtggagaagagcttatgttctatggctgtgttctgccagggatgcttggtagtctctgcttctcacctggaatcgcaccaccttctctgtggcaaggcataagtaggtgccagcccctcctggggtgtcacttggaaactggaaggcacacttgtgcagctgggatatgggttcatccacatcaaggagggcacactgcttggccacttttcggatgatctgcggcagaagggtgacgggcgggtgtgtgtgtgtgtgtgtgtgtgtgaggtagcagggtgtggggtccccagaggctcctcacccagccaggcagctctattctttgatagccatgaagtcccataccataggcggcagtgtaatgcctgtgacagtgcagacaagctgcaccagggagccgtagcggatgtaaccttcctggggtgggaagtccccttgggaacagtgcccatcagctggagatgaaagaaaggaaggaaggaagaaacaaaggttcattacttctcaaaccctgtctcttcacctctggctttaacgcacaacgcagctagccatgagaaaggaagctaagaccaaggttctaatcctggagagctagtctgtgatcatccacagtaaggtgtgctccctgggggcagccactgattggctggaggagaaaggtcatagctagccactgggatcagaagacatcgggttcctgaccgactcactagggccaagggcaagccttcacccccctccccaagggacagttacactgcttcatcttcctgtagggttgattaactatgctaacacacggagcacccagcccgcacctgctcatgagattacccaggtggagggtgaaggcagcccactgccttgcgctggccacaaaggccccatcttccacagagaggtaacgcgtggacactgtctgggagcgcaggcgattgaaaagggagacctttgagccggaggagatgcatactgcgaggggaacgtggaatcagtacccaggcctctcagatgtggtctctcagatgcctcagctcatcttctgacccatgtaacagcctggctaatatgcccactggcctagactcaatggttatctgcatttcatagccttttgcctggggtcttgatttttgagcttgccagctccctggtacaaatgaacatccttcagtgatgtgagctgggttcatcaagtcactcggggctgctttgtggcaggcacggcgtcgggtactgggtattgatgtgtgaactgggtccagctttgctctgaaatagttcatggtctggagggcataaatacaaaatgctaactccgtgtgggaaaggtctaagctaaggaaggcttcttgggggtgggaagtgtgaagcaggtgggagttgcatagatggctgctagagtctgaaagaacagggggactctcctagagcctggcttgtcttccagccgatggcatgctctcagtcacagcttcattttttttttttactggacttacaccagctggggatcaggcactgaccaagtgctgttcatctcctctccgtgctggacagactgctggccttccatttatacctagcccaagccctttccatttaatttactatacaatagattcttctgctcttccctttttctgtatgtgtgtgcaggcgtgtggctggacacacacagctgtgtgtgcgtgggtgtggaggccagagctagactcccgacaccttattctattacgctctaccttattctctgaaacaaaggctctcactggattgagagctctttggctagagctttctagccagagagttggaggaggatcctattgtctatttgctcagagctgggatcactgacatctgcagccacactcaatttttacgggtattcaaacccaggctcatgtgtttgccttgcaagcactttacccaccaagccatctccccatcctttgcttttctaaatacatatgtcagctcagttcactctccaggacaggattcgaagccagactgccagactctgcacgcataaccattactctaggtcccccacttttcctgagcaccaaggtgccagctaggacactgcttggaactgggatattccacaggacttttcaatgacaccaaggagctggattccgggatcacactgagtcgtggttacctccagactgggggacactttctgggcagacagtctcaagcaagccacatggtatgctatactgaaatcaaccaatcaacccaccctctctctttccttctctctcccgatccatttttctttcctttccccactctctcactccctcctaggctgacctagataagagttcagagttcttttatctaagcactggaattacacatgggaaccaccatctttggctgatgcaacttccttaaggtcatttttaatttgccccggatttggcacctggctgcagcttttgtctgttctgagtcccccactgtcatcttcaaatctgatatctatctcttacctgtgtcctgtctgaaatctctgtgtgccttttctcttagtctaggccagccactccacccagactcctcccttctttctacccagactccacctctcaccccctcctccacacttgcaccctccgcccatttttgcagctctgggttcgaattgcacccttccacctcgcccctctcacggtctgtgtttttcagcgactgcttcttctgcgagggcttggagatcaccttgatgaggcgactgtggaaagtgcccagctcctggccccctcgcagcaccagtcgcagcaccagccggaagtgcttcctcttatcggcgtccgagatgtacagggtcttggcacaaccaaattcctacggggctcaaggggatgcggcaggccttatctcaactttgccagcggaagagccaaccttccgcagttatgacatccttaccattaggacaagaaaccgtactaatctagggtctaggtcagaacccaccctctggcctccccagttgccttttggcttctggaggggacttggggagtctacagttttgcctcctctacaaaaagaaaaaaaaaagaggcaacgccaggagcaggaatctgatgctctctagtgcagcctcaccctggagtccggctgctcttcaaagttcaacttctgggtctcgggagcgctgccggacgcaccgtccagtcccatgtaaccgcagacggtgggcccggtctccgcagattggagggctgaaaaaggacgggaattaaaccctggaagtctgggggaagctcaggtgcgggtcaaacttagttcttgccgccagagggcgcagcgagactgcgcctgcaaccgtctgggctcccgggccctgctgaggcagttggtccttcctgcagaaccgagcaacagcccgtcagggcactctcaccttggtcttgcattggcttcaccctccagccaggacccgcgaggtagacacagggtggaggacagaagaacctgggaacacataacatcattttcactgtcttaaaagtgtctcaaggtggcataaatttttaaagaatcatgatttagtgtcccctctcccagagtgaaaccgttaatgcattattagacctcatcagtaagtcctgcccgctccatcttcaaaacacatctggaatccgttagattcctaccaacttcaccttggtcctaaccactatcccttgccttcccaactcagccttccatctgtctctcccttgctacagatgcctcttttagtttgtttttcacacagcaactagattactttaaaaaatttatttatggatatgagagctctatttgcatgtatgcctgcatggcagaagagaccatctgacagaagagaacatcagatcccattacagatggttgtgagccagcaagtagttgcgaggaattgaactcaggtcctctggaagagcagccaccagtgctcttaaccctgagtagtctctccagccccagattagttcttaagtaacaggtggctcagtggataaaaggcttgctgaggcaagcatgataacttgacttcaatgcccagaacccatcaaaaggaggaagagaaccaactgtacacctaactgcacacattatcctcttacctccacaggaatcgtggcatctatacatccacacagcaccagtatcaccaccagcaccagaaccaccaccaacatcaacaacaaaaataacagtcaaggggtaggagagacggctcagcagttaagagccctggctgctcttccagaggttctgagttcaactcccagcaaccacatggtggctcacaaccatctgtaatgggatccaatgccctcttctagtgtacaggcatgcatgtagacaaaatacacacacatatataaaatacataaataatctggaaagaagtaacagttaaattaagttgggtgtggtggctcacgtttgtaatcctaaacccagtacggaagggatggggcctctgaggcaggaggattggtataggttccgcctgagctagagttagagtctgtcttatcccccccaaaatataacaaaataaacgatattattaataataatgaaaatgaatcaaattgtgatgtcctcttatcaacatcccttgtggtttaaaatcccaaatcctcacatgacctggacactgcttctcctgtcatcttctctaacgtccccctcttctgaccagtctccccctttcatcctcttacagtactgagtatatagccttgaggtccttgcgttttctattgcttccagttagaatgcttcctggagttttcccatgcctggctctatctcagcactggtacatcagctccaatgtcacttcttaaagagccctttgacctccttgacctttcaagctaaggtatcccctttggtctactatgtgactccactctgtttttctctggctctcatcacaatctgaaataccttgtttgctggcttgtggggaggtgactgcatgtcccctaccagaatggagatgccatggaagtagaggctgtatctgcctggtccagctggaggcttagtgcccagcagtgaccctggtgcgtgacatgtagtacgcagcagaatgaatggatactggtcggggatgtggggatctgacagccactgtcaagttctgctctagatcccagtaggcagctgttgttggctggggaacaggaccctggctgaacaatggctgaggtgtcagccttgaggcctccaagatgtcaaagaagctaaatggtggtgggtttggagggaggcatagggctgaaggctgtggagacctgggtcggggtagggagccacctaccgcttctcatttccataggatttctgagccaccttggcatgcaggatccacacagtctgctcacatctttgctgcaggcatgtgcgcacaccttctcttaggatgatggcatgctctgggggtgacctaggaatgggggttgggcccacggggccacaggaaggagagtcaagggttgagttggcacaaagcccacccctgaagctgagtgagctgaagttggagatggggttgatttatgtcctccaagggatctgggggaagaaggacttgggaaatgagctaaatatttgtgttccaagaaccctgcacagacctcaccaggatcacccaggtgctacactgtgtgggtggcttcccggctgttgtagtctggggccaagtggaatagctgtgtttaaaaccctacatttggttctcagatggaggtgggctttgtggaaatagtaattaagctttcaactcataaggggaaacagcctttgccagctccaggtccggagcacaacctcaattcgagcaggcacatgcaccggtgaaaatgtgaccaaggctccaaactgcattaccaggattggggtgggggggaggcggcggatctgagtctttctgatgcccaaacaacacccttggcttaatgctacgggggttttcttttctttgagtgtagcacgggtcagctctctggggtctgttgcttatcagtccgagagtttgacaaatgaggatgggttctctcaaagcctgcgcaattaaaaggagcacatgaaaaagagtctgtggtgagtctttatttgggaaatgagcaagttgggccctgaagagagctgggaactccaaggctgtccttttgagtccttttacctttacggcaggaccaagtctcggcctttcatcactccaggaagggacagaggagggcaagagtcgggcgcgtccttggaagcccaggcaggccaggcaggcggcggtcaggaccgctccgcctcttggggctctcctctgggaagtgtctcgtgtaggattccagagcattccggctgcccggagtgtcgccgcccgactccagctgtagcccaattccggcccgcagctcgcgcctgcagctcccagagcagcaggaaaaaggggcgccgtgcttgctggggcccgagtgttgagaggaagggggagaacgctcctgccagtgggaggggtcgcagcccgcgctccccctccccaccctcccgctccaggttaaatgcagctgccgcttgggctcgccctggctgtctggcattccccacttagggcaacctgcccacgccgccgccgttacctggtccaactccccaggaggctgggcccgtcgctctgtagccgcacctctgagctgtccggcaggctcaggtgagtcaaagggcccgggggcaacgaggggtctgcagggaagccagcgtaaaacccgtagggggacaagtcttaacagcctacgtgtccacgtctaacctgcagtaccttttccgatccccctctggcaaggccaacaaaatgcaggtcctccttccctaatctccctccacgcctggcaccttcccaaagtgtcctttccggattagctcttgaactcagacctctttggagcgcactttccttgggaatgcactttccctatcctaagggcgtccgagaaatttcctcttcaatgcaaggatccttatcaggagacctgggctcactctaatgggccactacttcaaagcaagcctttgaacgatgatgactctctttgccctccctagaccgccccccccccccccgtggaacagcggatttggaaagctgaaattgagagggcagctgttttgactttctaagagtcctgaggtgcaagcgacatcaagtgcgtgttgacttaagccaagaggagcttaagggagcccttagtcaagagccaaccctgagtttcaaaggcccggtggagctatactcagatgtttgccctggggtgctggctccgctctggcccactctagaaaaggcttgcctttcctcctacctccaccatcaagccactggcacatctagctagcttgtcaccttaccaccacagaccctgccagaaggatttttgttcttctaccctcgctggaaagccagaagggagaagaatctcggataggaagctggtctggagtcagagccacgcaccggccttgctcagaatgggctcattcaaggaactggggggttgggggaggggcagccgtgggttaaggggcgatggcctgctctgccaagaaaccacagaaaaatggatagagcaggctcagtgtgccgtgtgggggtggggtggggaacggaagaaaggcttagtgattcttaggtgcaagggaaccaggcttctctggaggaagagacaggggtggggtgtaggggggtgagagctaggtttagttctgtgcctggagcccagctgggtagtcttattgggcagcacattttccatccgtacagtgtgtgtgttcccttagtggttctcaagggacctagttaggctacacaggaaggagagggctcacctgttgtctccctggggtccatggctgctcatcgaggcccaggccgctctcttgctgccctctgggcacatctaccgccactgacttcgataccgttcacacatctaagccccgatccgatcctcacactggatttatcctgtccaagccttatcttcaaggtcccgggactcccagcggcctgtttgctctgggcagggacacctgctgggcagatgtaggcttcccacggcagtagaagccagacccagcaggcgccccctggcggcctctcctaagagcaggcgagaaacagacaccgaggcgtgtcttgtgcaggactccactctctggcctaccactaagaacccagaccccaagagctgctctttggcgtgtggcacgggtttgggggaatatggggaatgatttctgtccgcagaagaagagagtgtggagcaccttagctgactcacacaccagatagacaggactctatctcggccgcagccactttcctgctataaggcgttgggtagcagcatttaatttcttaaagcctatttctgaatagggagaaccgaaccaaaacagccttaaatgtcggaactacaaagagggtcaatgccacaacggaaaagcacatttagcactatatctggtatttaggaaggggttctttcggggactggcaagatggctcagtgggtaaaggtgcttgctgtcgggactgaccaccggagttcagtcctgtttaattctgggacacacacagaggaaggagaaaacggacttcagcgaattgccccctgacctccacacgtgtgtgccatagtgtgtgagcacacaccatatacatgtatatatatgtaacacacacacacatatatggtgtgtatgctatataatatatatgatgtgtatgatctgtaatatatatcatatatatggtgtgtgtgtatatatatatatacacacatatgtatataattttttaatacaagcgtttatctccttttgagttttatgtatttttatctacttcttattaacttagtgccctgtagttctgtaaaatgccattttttacaaaggctcctctgtgagtttcagcaatcccagtgtggtgacatcaaaaaattatcatgagcctttttgttttgttttgagaaagaatctcactatgtagccctgggtggcctggaactcactatgaagaacagactggtcctcaaactcccagagatctgcctgcctttgcctcccgagtgtgcagctatgcctggcaaaacattttgaacatacgcaaagccagagtgttcatcccctgcaataaaagcaccgtcaaaactgttgctttgcgaccttcttttctagctgcaggctgtgacactgtggttcgtcatccttccaagcaccatgagaggcccctgctgctggccactctctctgttgctgctcttcctgcagtcctgggaaactcagctccagtctgcaggtgagttggatcccagccctcaccatgggaggaagggagcagcaacgttctctatccacagtgagccagggttgccaggaggggttggcacactggtggaaggatgggtgtgtgtatggggggggcgggctttagaacacaggctggattcgggcttcatccctcccacttcatccctcgggcgggcgctgtttcctcaattgtagtatgtggcatagttttgggttcattcggtgtcgacttttattgaagcttattgaaaccatggaaaaatcaggagactccacattaaaaaacaaccctatttgagaattttcttgaacaaaaccaaccaaccaaacaaacagaccagggacctgcttgctgggacaatccaagttatcagagatacaggagatgagatgttctagatataatctaatcagttcattcatttatggtgtctggctggctcatgtaggcatttgagacagcgacatctctttgttcactcctcaatacataacacagactcagaacagctcccagaactgcatgcgcgcgcgggggtggggtgggggaaccttgtgtgatttcctggctcaggtctcctcaaatgatggatgagtaactgtatccaaggctaatttgttaggttaaagacatgctgggcactgttccattcagataacagcaggtcttccggctttttctaagagaccagctttagctgacccgtgagagtcctcctccatcttcccgcaggtcctaggtgctataatgggcccctggatttggtgttcatgattgatagctcccgcagcgtgcgccccttcgagtttgagaccatgaggcagttcctagtgggcctcctccgcagcctggacgtgggtctgaacgccacgcgcgttggggtgatccagtattctagtcaagtgcaaagcgtctttcccctgggcgccttttcgcgccgcgaggacatggaacgagccatccgcgcggtggtgccgctggcgcagggcaccatgaccgggctggcgatccagtacgctatgaacgtggccttcagcgaggccgaaggcgcgcgcccatcggaggagcgagtgccgcgcgtcttggtcatcgtgacagacgggcgacctcaagaccgagtggccgaagtggccgctcaggcgcgcgcccgcggcattgagatctatgcggtaggggtacagcgagctgacgtgggctctcttcgcaccatggcttcgccgccgctggatcagcatgtcttcttagtggagtccttcgatctcatccaggagtttggcctgcagttccagggccgcctgtgcggtgagttagagtggcacccagctcaggcaatgcagatgctcattctagttcgcatcattaaaggcgatccctcaattttactctgccctctgggtaccagttgccgtggtccctcctgcagagtggtatcctcagcagccagtcatgctgtgtcagagactgaccctgccacaagctgtcaccccccccttctcccgcctcccacaccaaatgtcttttaatcaagaatcgctcaaaattgatagtattgtctgtcaggagtcatgccccgcccacccgagtatgttcctccaactttaagtcccttttaaatcttgtgtgtgtgtgtgtgtgtgtgtgtgcgcgcgcgcgcgtgcgcgccaagatttcttgtaacctagactgtccttgaagtcgatttgcagctgaggctgaccttaacaccggatccccctgaatccaagctgtgcagtgtcctcttccgagacccttcaaaggaactacttgcatcctgtttttcctctaatcttgtcacctggactgaccctctccaagatgcaaatccatatctaacctaagtccaaccttgggaatggtatttgcttcagacccctacccctgccctgctgtctgccctccccttggatgcttctgcccatctgttctctgttgattgccccttgtgtgtccttagggaaggacctgtgtgctgagttggttcatggctgccaacacctgtgtgtcaacgccccaggaacattctactgcgcctgcaactctggctacaagctagcaccagataacaagaattgtttgggtgagtgccaccccatcctgctgtctcattgtcttctttggctgcccagcaccaggacaactctttgacaagctcttcagaagtaaaagcacaccccatttgctgtatgatccacacagggagggaatatcatctggggccacacaactctttggtggtccggaacttggagtcttgacctctcacagttaaatgttctctctgtggtgcctcctttctgcaaatcttttttttttttttttttttttttaatcttctgaagagctatggtgcgtgaggaagccttgcttagatgattagttgggtttttttggggggtgggatggattatatggtcccatccctgtgactatgttttctaccacacgcagagtgcccgttgttggaaagccgtctctatactttcacagcaactagttccacaattctagcttcaatgatctggaaaagggggtcatgtgatcccaacagctctgttgtcacatgggtcctcttgtgtttagaaactttgaaaggctgaggggtgggctggagaaatggctcagtgatggagggcgcttgttacacagtcatgaagactttggatctcagcgctcatgaaccagacaagcatctggcaaaggcctgtaactccagctctgaggtgggaagagagggagatccctggggctcgtggttcccataatagctaagaaacaggaggtcccggtccagagagagaccctgtctcaaaggaataggtagagagtgatggggaggacacgcaacaccttttctgagtgtgcatacagttgtgcacaccagcacacgcacacattaaccaaccaactaactattcaaaggtcagcttaaaaggtttagtatgcacccccgttagaatatgatggatagtaagtcttttcctaaggtatttgggaaatgcattcaggtagctgggcttctgcttactttctttctccctctttcctttcctcttccccttcctccattgtcttaccctcctcccctcccctgtctaaaacctgtctaaagcccttccatgtgttctcttcgcatcaaccattgctctctccctctctcttccctgttggctcctcataaactttaaannnnnnnnnnnnnnnnnnnnctactaagagctggcttcctgagctcatctagtgacgagtatctcctagagacctccgctaatcgatcttttttcttctccctttttcctctttttcttctaatctctctccaggtattcctacctaaccttaacttttcctcgggttcaagacccttggaaaggcctgtatacttattttgtgtaccatacttcctctttgttcctactctctctccccgctttacttctgatagattgtcctgaatttcctctagaattttcagccctatcttaatcacttgatagcatgtgaaaaagaacaaaagggctcctaacaccagaaaaaattcaaggccaaacatactcactggtactctcgttccccagctgaaaagttctgaattcatacagttgaatccttcttaacagtctgctttacgggaacctttatcaccgtcgttccccagctgatgagttctgaattcggcagttgaatccttctcaacagtctgtgttacgggaacctttataaacgtgatccgcagttctggttctgaaatgaagtatccctcctgcgccagtccggagttttttctcgtcccggaattcggcaccaattgttattcgacgcgttctcacgaccggccaggaagaacacaacacccagaatcttctacggcaaagctttattgcttacatctttttggggccagagtgtaagaagcaagagagagagaaaaacgaaaccccttctatttaaaagagaacaacaattgcctaggacgcatcactccctgattggctgcagcccatggccgagctgacgttcacgggaaaaacagagtacaagtagtcgtaaatacccttggctcatgcgcaaattatttgtttaccaacttagaacacaggatgtcagcgccatcttgtgacggcgaatgtgggggcggcttcccacacttgtcacctggactgaccctctccaagatgcaaatccatatctaacctaagtccaaccttgggaatggtatttgcttcagacccctacccctgccctgctgtctgccctccccttggatgcttctgcccatctgttctctgttgattgccccttgtgtgtccttagggaaggacctgtgtgctgagttggttcatggctgccaacacctgtgtgtcaacgccccaggaacattctactgcgcctgcaactctggctacaagctagcaccagataacaagaattgtttgggtgagtgccaccccatcctgctgtctcattgtcttctttggctgcccagcaccaggacaactctttgacaagctcttcagaagtaaaagcacaccccatttgctgtatgatccacacagggagggaatatcatctggggccacacaactctttggtggtccggaacttggagtcttgacctctcacagttaaatgttctcttctgtggtgcctcctttctgcaaatcttttttttttttttttttaattctttctgaagagctatggtgcgtgaggaagccttgcttagatgattnnnnnnnnnnnnnnnnnnnnnnnnnnnnnnnnnnnnnnnnnnnnnnnnnnnnnnnnnnnnnnnnnnnnnnnnnnnnnnnnnnnnnnnnnnnnnnnnnnnnnnnnnnnnnnnnnnnnnnnnnnnnnnnnnnnnnnnnnnnnnnnnnnnnnnnnnnnnnnnnnnnnnnnnnnnnnnnnnnnnnnnnnnnnnnnnnnnnnnnnnnnnnnnnnnnnnnnnnnnnnnnnnnnnnnnnnnnnnnnnnnnnnnnnnnnnnnnnnnnnnnnnnnnnnnnnnnnnnnnnnnnnnnnnnnnnnnnnnnnnnnnnnnnnnnnnnnnnnnnnnnnnnnnnnnnnnnnnnnnnnnnnnnnnnnnnnnnnnnnnnnnnnnnnnnnnnnnnnnnnnnnnnnnnnnnnnnnnnnnnnnnnnnnnnnnnnnnnnnnnnnnnnnnnnnnnnnnnnnnnnnnnnnnnnnnnnnnnnnnnnnnnnnnnnnnnnnnnnnnnnnnnnnnnnnnnnnnnnnnnnnnnnnnnnnnnnnnnnnnnnnnnnnnnnnnnnnnnnnnnnnnnnnnnnnnnnnnnnnnnnnnnnnnnnnnnnnnnnnnnnnnnnnnnnnnnnnnnnnnnnnnnnnnnnnnnnnnnnnnnnnnnnnnnnnnnnnnnnnnnnnnnnnnnnnnnnnnnnnnnnnnnnnnnnnnnnnnnnnnnnnnnnnnnnnnnnnnnnnnnnnnnnnnnnnnnnnnnnnnnnnnnnnnnnnnnnnnnnnnnnnnnnnnnnnnnnnnnnnnnnnnnnnnnnnnnnnnnnnnnnnnnnnnnnnnnnnnnnnnnnnnnnnnnnnnnnnnnnnnnnnnnnnnnnnnnnnnnnnnnnnnnnnnnnnnnnnnnnnnnnnnnnnnnnnnnnnnnnnnnnnnnnnnnnnnnnnnnnnnnnnnnnnnnnnnnnnnnnnnnnnnnnnnnnnnnnnnnnnnnnnnnnnnnnnnnnnnnnnnnnnnnnnnnnnnnnnnnnnnnnnnnnnnnnnnnnnnnnnnnnnnnnnnnnnnnnnnnnnnnnnnnnnnnnnnnnnnnnnnnnnnnnnnnnnnnnnnnnnnnnnnnnnnnnnnnnnnnnnnnnnnnnnnnnnnnnnnnnnnnnnnnnnnnnnnnnnnnnnnnnnnnnnnnnnnnnnnnnnnnnnnnnnnnnnnnnnnnnnnnnnnnnnnnnnnnnnnnnnnnnnnnnnnnnnnnnncctccttcttcctcctcctcctttctcctgcttactcctcctcctcctcctcctcctcctcctcctccttcctcctcctcctcctcctccaccaccacaacaaaattctctcactgcatccagagcttaccggttggctaacggggttagccagtggactttggagatctgcgggtctctgcccatcccagggctggggctacagctaccactcctggctttcatagggatgctgggggtccaaactcaggttctcatgcttctggagcagacacgttacagactgagcatctccctggttctcacctaggttttgttagagagggcttacgcgggttgcgtggcttccgcaggttgcgtggcttccgcaggttgcgtggcttctgggggttgcgtggcttctggaggttgtgtggcttccgagggttgcgtggcttccgcgggttgcgtggcttccgagggttgcgtggcttctgggggttgcgtggcttctggaggttgtatggcctccgagggttgcgtggcttccgagggttgcatggcttccgagggttgtgtggcttccgagggttgtgtggcttcaggaggttgcgtggcttccgagggttgcgtggcttccgagggttgtgtggcttccgagggtggtgtggcttccgagggtggtgtggcttccgagggtggagtggcttccgagggtggtgtggcttccgagggtggagtggcttccgagggtggagtggcttccgagggttgtgtggcttccgagggttgtgtggcttcaggaggttgcgtggcttccgagggttgcgtggcttccgagggtggtgtggcttccgagggtggtgtggcttccgagggtggagtggcttccgagggtggagtggcttccgagggtggtgtggcttccgagggttgtgtggcttccgagggtggtgtggcttccgagggttgcgtggcttctgagggttgcgtggcttctgagggttgcgtggcttctggaggttgtgtggcttctgagggttgtgtggcttccgagggttgcgtggcttccgagggtggcgtggcttccgagggtggtgtggcttacaagggttgtgtggcttccgagggttgcttggcttctgagggttgcgtggcttctggaggttgtgtggcttctgagggttgcgtggcttccgcgggttgcgtggcttccgtgggttgcgtggctaggctgtgaaatgaagcccctagcaaagactgacttcatcctctttccagccttggatctctgcgctgaaggaacccatggctgtgaacacctctgtgtcaactccgtggactcgtatttctgtcgttgccgagctggctttgcgctccagcaggaccagaggagctgcagaggtaagtgagcctcccacaaccccctctctgtgagcgttctgaatggcccctggtggctacactcagaagtgacatcctgcggtttcttccttccctcagccattgactactgcagctttggaaaccacagctgccagcatgagtgtgtgagcactttggcggggccacagtgtcgctgcagagagggccacgacctgctacctgatgggagaagctgtcggggtgaggaggtgtctctcatatttgtagggaatagaaagggattctagctgctgggatctaacctgaccggtcctacttggtgtctcctttaaagtcagggacttctgcaatggtgtggaccatggctgtgagttccagtgtgtgagtgagggtctttccttccactgcctgtgccctgaggggaggcgacttcaggctgatggcaagagctgtgaccgtgagttatatataaggcagagggtctgctccggccccattgcctgcctcttcttcaatgcccagttacagccccacagatggtggtgtgtatgtgcgtgtgttggcggatgtgcttataatgcccagcttcttttccaaccagtcctctatcctgctgtcaagactgatttcaaaatccatatctgatcacgttcctctttcactcaaaatacttttgtggttcaccagtgtctacaaaagcaagtgccttccctccgaatttttccagtgctgggcacaaccacattaatggataatgaaaccaaattagtgggttgcaaccagcatttaaagaaaagaagagaaaaatagtttcctgagtttaggagagtaagtattgcttcatgagctggaccgttcagttacgtgaaatgcaccgtggtctatcattattctcttttttcatcgtgggctgtggtcaattttgaaatcatcacttaatctcattaccatgtagctttggccagctctttagcccatctcttgccacacttgaacattttagtcccactggcctgtccctctccgagtgtgtcatacccttcccggctcccatgcctttgtgtgtgctgtgccaaccttctagaatgccccccttgccttggcaaattcccggtcatccttcaagacggcattagcccatttcggttgccatggtgcaacaccgatgtgagttgctataatgaaaacgctcaaagcggggtgattggttagagagtagagcttacgtggctcacagtctggagcatagcgtcaacatctcagtattggcgatgaccacgtgacaggagagagcccctgagattgaagagtatgtgtgtgtgagggttcaaatgcaggaggtggccgtcctttgtaacctttcactgacagggtcattctagtctctcgagacctactcaatcctgtgatgtgggcgttaatttcttcctagggtggtgctccatgacctaatcgtctcccagaaggcctgttatgattcagagagaaagtgctctcttgcaagctcatgcctcaaaggcttggtccttaatgccaacatgttcagagcctgggatcttattaattgattaacccaaagatggattaaacacgagagtaggtttttagggtgttgggagatggaactgtagaggataggccctagattgagaaagtgggtcactgggggggttaatgccatttttttttgagacagggttttatgtagcccaggctggccatatactagctatgtaactgataatgaccttgggcttcctaatcctactgcctccgaatgttatggtaacccccttttctgtggtgttagggctctaactcagggcttggtacaagctaggcaaccgctctaccaaatgagcttcatatccagttcctgaagcctgggatttggatgtgtattccaggctggtcttgatcctgcctgtctcccaagtgctgagattacaggcttgtgcctccatgtcctgtttgaagagtgtcttgtccctgcctgcctgtctgtctgtctgtgtttccttctgtaatgaaggatgttgcattcctccatcattttcctgctgtcatgatatctggcctctacccaggtcaaaggcaatggagccagacagccgtgcactgaaatcttcccaagtcgtgagctaaagcaaatccttccacccttaagttacttccatcactgcaatggaaagacccctaggtctcaatcacttctcagtcctgttaccctggggaccaagtttctagcacatggtctcttgggcacaaaccatatctaagccacaacaatatcttaaatgtttatttctcagttctggaaaggctaagaccaagattcgggcagatacggtgtcccatgatgctctgcttcctggcttatacaagatagttttctctttgttctcccttgatggatggacggaggaagcagactctgtagaagctcttgtcagaacattaattaattgcattcatgaaggcctgactctcatgtctgtgtctaatcccaatttcgtcccaaagatgatcacattgagacagggttttatgtagctccgactggcggtgtatagctatatactgataatgaccttgggcttcctaattgaaccccaccacctccacgaagccttcctcaaccactctcagggaagtgatttattccggtcttgggctcccttactgcctcctcatagtgcactttccttaactgtggcagatggcatgtctgccttgctacagtctgccctgatcttgtgggtcaggactgtgttttctttgttgttgaatccccttctggtactcaagaagccactggatcaggacaaaggaggcagtgtcttagtgagcaggtccagtggtttgtggtttagatgccgctgccttccaatcttggctttgccgctgttaacttcagaacctagtttatgggaaatggggagagcactcgaggagaaagtgtgtcaagtgcgagtttcagcgtctgacacgtgacaaacaccagaaaatgttgttcttgccattgtcattaatactgatatggtgcttagaatggtgacagatacatactaggtgatcgaggaatgctagctattgtggtatatttttgctcttggttgtttaataacgaaccgggaggtggtgatgtttgcctttaatctctgcacttgggaagcagaagcaggcagatctctgagtttgcaactagcctggtctgcatagtgaattccaggtcagccaggactacaccgagaaatgctatcttgaaaaaaaaaaaaaaaaagccaggcagtggtggtgcacacctttaatcccaacactcaggaggcagaggcaggcggatttctgagtttgagaccagtctggtctacagagtgagttccaggacagtcagggttatacagagaaaccctgtctcgaaaaaccaaacagagaggggggggggggagaagagagctttcaataaagcatttggttagtgccaagcacttaacatcaaaagttgtcatacaaaagaggacgatggttatgtattgattgctgggcacacacagtcaggacacataactggaatgcgttatatagtaaatactggcgatgaataactagatgagtatgttgttctcctgggcaaggacctgatccctccatccaagccttctccttggcagggtgccgggagggccacgtggatcttgttctcctggtggatggttccaagagcgtgcgcccacagaacttcgagctggtgaagcgcttcgtgaaccagattgtggatttccttgacgtgtctcccgagggcacacgtgttgggctggtgcagttctccagccgggtgcgcaccgagttccccctgggccgctatggcaccgcagctgaggtgaagcaggcagttttggccgtggagtacatggagcgcggcaccatgacagggctggccctgcgtcacatggtggagcacagcttctctgaggcgcagggcgcgcggcctcgcgacctcaacgtgcctcgcgtgggcttggtgttcactgatggccgctctcaggatgacatttcagtgtgggcagctcgtgccaaagaggaaggtaggtttggcaagggatggactggtgtggggttggagttggggctgggaagcagttttctccaggcttggagctttctcttgagtgtctgggccctacaggcatcgtcatgtatgccgtgggcgtgggtaaggctgtggaggaagagctgcgtgagatcgcatcggaaccatcggagttgcacgtgtcctattctccggactttagcaccatgacgcacctgctggagaatctcaaaggcagcatttgcccaggtgagtgaatctcttccagccgaccggagtgcatgcgtatgcgcgcacgcgcgcgcgcgcgcgcgtgtgtgtgtgtgtgtgtgtgtgtgtgtgtgtgtgtgtgtgtgtagggatggggacgagagggcagggtctgttgtcttttttacctagcctctgatagatgccctggtcctcagctcttcactacccttcagctctctacacagagcttgttatttaaaacccagagcaggtctgtcctttaccgtagcttgtcaaaaacgcagccccgacagtgaatcggacccttacgtgctttgtgtgcacctcagagtcaacgaggcgttgggatttttttttcactcaaattagtagtgtctggaataacttgagaaaactgtattattaaaaatatgtttaaaattgcattttaaaaaattgcacaccttttgcctgcatgtacgtacgggcctggttcatgtggaggccagaagtggggggcagttcctgtgagactacagatggtttgtgagtcgccgtgtgagtgctggacattgaacctgggtcctctggaagagcaggcagtgctcttaaccactcagccatctctccaggtcaagagaaaacttttaaaaaagcaagtcaaatttagcatttacaagcgtaaccgactataagcttccagcttgtggagattcaactttatagatttggcaaagtgacaggacagggttgtttttttatttttattttttatttttatttttttacagtggcttgtgctttctggggacatagaccataaatgccatcattgtaatgtatctggtctccagctgggggtgggggggaggggaaggatccagacatgcccgcggggaacagctgggccttatagggggcaaagtttcttggtggggggcttgattttgactatggggtctttagattctaacacatgtctaaggcgtgactcttcttccactgtctactgctgatagaggtaggtgagcagggctgtgtccagggcagagaatctgtagttaaaagtgctccctgccctgccaccaactctaacaattaactaaggtgttttggacacatcaggcttaagggcccttcccgtcccgacttatttacaatggaccctggataactcacttaaccccggccctaccttaccctcttctgtatgaggaaagatgcccaaagttactgccagctttagatttcggaggcaagttggaacgctctgctaaagctcttcactggctgaccattcaggcccaggcagatcctcatctttctgtaaccctcggttctacagctctaaagtcagaggtgaacatttgggagtgttaacgaggccatcaataaaatgacacaaggatgagggtttgactgatagtagaatctccctatggaggctgaggctaagaatcttgctgctattttagtgcctgcaatattaaaaaacaagagctggtgagatggcacagcgtgtaaaagcagctgccatgcaaacccggcgacctgagttcgatcctggaacacattaccaaaaagcccgatgcgatggctcacatctgtacccagcatccctgcagggagatgggtggtgcagacggaagcacctgaaagcttgcctggatacaaagagaggcaaaaactaaagagagacgctgcctcaaaaaggtgtgaggagagagttgactcacaatagatgttctctgatgttgacatgaatgctgtggtctgccctcacacatgtatcatacacatacataataaaacattaaaatagaaaatggcgtggaccagcagtgatgctatctccgtaatattccccaccattttctgtactgttaaggaaacatagacaaccaagtttatctctactctactcttagatgttgaagtgtgtgtgtggagataaacttggatccataattttttgtttttgcgtttgagacggggtttctctgtgtagctttggctgtcctcctggaactcactctgtagatcagactggcctcaaactcacagagatccttccttctgcctatgcctcttgagcgctgggaccaaaggcatgtaccaccacgcctgacttggacctataatttaaacattaatttcatcagaatcagtggaatcgcatattgttgcacttcatcctgactcactaggtctgggatagggtttgataatttgccattatgacatattcctaggttatgctaatactgcttgtccacggaatgctggtttactagaaatacacagtacagggttgacttgtgcctggcattgctctagatattgtgccagtacggtattcagtcgctacgtgtgtatgatgaattacaattggtcacaataacacagaataaaaactgagttcttcagttgtacccgccacatttcaagtgtcttaagctccaggtggcttttgggtattgaatcggccaggacagacagatagagaacatgtccattgtttgtcgtggtctcatttggaccagctcatccatctagactttttctaatcaaagtgaaacccatggacttcagaattaatgtgtttcaggagcttagtgaaagtgcagatttttactctgagtcgaaatctggattctagcaagctctgtggtaatcccagcaagcataagggttggagaatttctcttgcaagtgggtccacatatgcaaatcgtctaatctcataaccactagtgggtagcttctttcattatatccattttacggatgcgggggaattgagacttgaggggttgagtttcccccaggacttctgtgctatttggctgggactcaggctaggtctaaatccaaagcctgcatgtacaccatcgactcggtagaggtgtatcagaaggtcgaagccacagcctggtgggctcccttttggttcctcattcctttgactcttggctctctccttgcagaggagggcattggcgcggggacagagcttcggagtccctgcgaatgcgaaagcctcgtggagttccagggccgcacgctgggggcgctcgagagcctgacgcagaaccatatccttttgggctggaggtgcgggttgcagggcgggtgaagggatctctgagaccacatcttccttaaccgctcactggctcggctgacagagcgcctggaggagctggagaaccagctggctagccgaaagtgagggtcgcacgctgtctgagcagccacgcgagaccgaggccgagccccgcagcctggaccgtccaggagggggcgctggcgggccccacgcgctgccttcgagctggcctcacctggaccaggagccagatttaggggatggggatgaggggatggggaggtgctggtggggaaggactgctacactcgccgcgagctttgttggatttctttttttgttttccttttctaaaaaaaaaaaaaaaaaatttggttttcacggggtcggtttgtggctattgctatgctggcagagggaggggagttcagacgagcgtgctcataggcgcccgggtggcgtcctcttggagaaaggcgcattgtgcagtactggggctggggggcagggggccgctgcttcccgtctcttgtttattcagccccagaacagatggcccgttatgtaggacgtggggagggaggggatgccccgagaacctttgggtccgaggaagtctgagtcccccatcttctagcacgtcgttttcttgctgttcctgtcttctggagccaaaaaatgtggctcaaaggccgcttgggacctggctggggatgtgagaaactctgttgagcccctgaccagaaagagtgggggatgcgggatgtgctccacctggattgtatcatctgcctctgacacttggtggcatccctgagcctgtggctctcttctgccactccttcaagaagcaaagctgagctgcatgcacacaaccctctctaccagcaaggaacacgaacttcccgggtacacacggcaaactaaagcttaaaatacgttgggttccagaatgggcgtcaggtaaattcccccgggtttgttttgccgttgttaaagctgggacaagggttaactggtacaagcaggactgtggctagaggaatgtatgctaaggtacctgactttgtgcccgacatgtattttaggtcctttgttaatgatagttagcaattattcttatagaaatatgtcttggacctggtttgaagcgatttcctaatattgccattgtatccgttttttatccagacaacctcgtgagataattaggatcttagaaggcaagatggctcagctggcaagcacatttacacattaagatttacaatctgctttcaaacatcagggtcctcatggtaaaagagagaactcctcctgtaggatgctctctgacttccacctgccacctgttcctacttcatcagaatggtcagaaacggggcgtggtcagaacggggtgaaagggaggggcctggactcgataccaggtgacagaaggctggataccttagagggaggggaagggtatgactgacctgagcctcgtgttctctaaagccacattccagaagggccggaggagagaggggagtggagggcagttgcttgtgaatcaaggaataaccacgatgatgaaaatggtcctaataatgtaaaaataaatgctaaagataattattgccttcatcatttccattttagacaagaggaaatggagtcatgtagtttcccaaaacggcacgtctagtcagaggctggactgacatgctatatttctgattgctgctgtaacaaacgagagcttcgaaggcaaaatcagttccctgtctcacagttcccggagtcagaagtccaagatgggttggcagggttgcattctttctggagaaatctgctttcctttgtagcttctagaggcctcccaagtcccttggctcatggtctcactgccctctgatcttaacacctctctctctctctgtgtgattctctctttctctgtgattatattgttatgactttgacaatcacagacatgcttctacttcagaaaaactcccagaagtctcctttgtcatgtagagtcatagatttattcataggttcccatgattcaggcatggaagttgttgagcggaacagggccgaggctaggctggctgatgtctgtactgctaaggctggatagggagtgaggtccacctgtgtacaactgtatagaaaaggggaatgtctgatgaaggatagtgcaggcaagaaaaaaaaaagggggtggtggtggtggggagctttgagcaaaaccttaaatgatatggcaatactttctgtgattggtcatgtgggtcaggagcggctgggaacaggagctgagatgatcaggaccttacttagatatcatgatcagataaagtaagcaggccggggtagtggctggcatgagagctcaccttgcccaatccctcaagtttaaagttaaggaaagtccttcctaggggccacaggttcttgtctgagagcacaccgtgagtaagcagaggggccagatagaagacttgcgtggatgcgggactgcaatagggcacttcctgttggggaactgtgagggctggtggaagctagagcatccatctttcctggatgcaaccaacacctacctgcttcctgtccctaccatttctttacgtctgcattctcccttgtggccacaggatggcgccggaagctctgctttagacctgtatctcagcaccctagcaggtgcccccctgccccctggagcttgggctaatgatggtccttccttttaacaccaagggttttgaactgcaaagaggtccgtgggccagggaggaagtctcgggtaactaagatggaagacatccttcacacttggtccatttccccgaatcaagcacactttctcagggttggatcttaccattttattttggactggagggcaccatcgattcaacctctgttaacttgcgggtctgatggtaaatgttcccctttcctgcgagcatttaaagtttatgaggagccaacagggaagagagagggagagagcaatggttgatgcgaagagaacacatggaagggctttagacaggttttagacagccaagggggtaggagcgttgtgtgaccacgtgattctcaaggcaacactgtgaggggtttggagcatagatcctttcactatcagaggaagccactggtgagagaggggaagacagatgtcccaaatcactcaccaagctcgtaatgtcctggccccttcctaactcatcagaatggtcagaaatggggcgtggccagaacgggacgaaagggaggggcctggactcaataccaggtgacagaaggctgtataccttagaggagaggaggggaagggtttgattgacaggagcctcgtgttctctaaagccacattccagaagggcaggaagagagagggagtggaggacagttggtgtgtgaatcaaagaatagccacgatgatgaaaatggtcctaatagtcaccgtgactggcgtttatggtgattcacaaggaagtttcccatcactttgcagctcagcagagccacgtgccacccaagggggattacagggcagtgcggtggctgctattttactgaagggagacacgggctacagaggggagggtgcctcgttcaagattatacgtccaattactgccagcgctgggctggacagagacctcctggctcccagccacacatgggctgccccacatgggctccagctgtggccagccagaaagaatggggcctttgtcagagctgaggatcaggcacaagcctcccgcagccttggcttgaggcccaaggagatggttaggagaggaggcttggggtgtggggttgggggtggggtggggtgggggcgtagaaggttctagttagactgaggagctgatcctcaaatgacctgtatatgcccttcagcttcccttcacacttcctgctagccatcctgacttcgagtcgagtccgcggctttgtcctggacaatctctctttcctttgtattcccttcctccctcccctctctcaacaaagaccttcactcctgccttacttagtaacttgacccaaacttttcagtcctcctgctcaaagaaaaggagccccttctttgtgagtaatgtccactgagttcctactgtgtgccgggcttctgccaggcacttttatctttttttttttttttttttaagatttatttattacatgtaagtacactgtagctgtcttcagacacaccagaagagggcatcagatcacattacagatggttgtgagccaccatgtggttgctgggatttgaactctggaccttcagaagagcagtccggtgcttttacccactgagccatctcaccagccccccaggaacttttatctttgtggtctctaccacaccttcacccttttgtgatggattttattttctctgttaccttcctatcccgcgttcaaaatggattgtgattcagggtggatatttctttccagatttcattagtgtgttgtgactttcaaggaaggtcatggcaggatggtggtagtgactatccctggaattttgctgtctttaaccagacattcttatattaaaaaaaagaaaactaacaataaaaatcctactatgcagaatatgcttgtgttgctcttgatgagcctgcgtctgggcccagggtgtccttgccaagcaaaatagaatccctactgtgttccatccttctgtcctgcttacgcattatctcatatgtgggaaatgcacagtggattagagagtagagaggaaaggacagagaataaacaaataccacctttaaaatatccgaggtgagttcaatgccaatactgatagataaaaactagagcaagaccctagttacattctctggtagacgccagccacaagcctcctcttccaggaagtgtcccatctgtcccgaaggacctggttgtctcctggagaagaggactcatgggtccttggatctctctggtgtctgatggtctatgtacccattgaactttcttatgctctgcagcttagagaggggtggcctccagaccccagaaataaaacctataattaaccaggaatactgtctgcatctctatagttcaaagataaatagtgctatctcaagcttcataattccaatcattggaggacattttataagactttggtacacttccatattactctctaggagtacagctgtattttttcccaacttgggttttaagtaatttcaaggaggacatgtttctcatagcaagaacaaagttttaaggccaggtctacacgagcttgagttacttctctgccactttttttttttttttttagctgtatgatgttaggggaaaaaaaggtctctcttaaccctttgaactttaacttctctgtgagataatgacagcacatccccaattgcaaatcccaagcctgagtgcagggattcaacgtgagcatgcacaagaggcacggttcacaggacgtcagtaattacagggatgacagcaaacagtcatttgcgtgcttgctgtgtgccaggccctagacatccatcattgtcgttaatctcagaattggctcacagagtagatgttgtaacgctccccattgcacatccgggaaggggcaaaattagcaccgagctcatcccttggtgctgtgcctgtgaatggcagcagggtagaaaagaggccaggaacttgaggggtctctctctgtgtctctgtatctctttgtctctgtgtctgtctctctctgtctctttgtgtctgtgtctctctgtgtctgtctctgtctctctccctctctccctgacaaggttttgctcaggctccattggagcttgttctccttttgcctctgtatcctgagcactgggattacagccaagtatacaccactctccccagccttggagagccttacagagagatttcctgagacccgggaaagagtcaagaaagcatgaccagctctagcttgtaaactgggacaaaggaggaagctggacagacctctgcttctgagataaaactagaaggtgtgcatcttgtgggtgtaggagaccacggaggcaggggagagcacagcaaggaagctttgttcccccaccccaccccccgactccatcccaatcccaaagacagggcttctctgtataactccagctatcccagagctcactctgtagacgaggctgaacttgaattcacagagatctgcctgtcccagtgctgggactgaaggcatggaccactatggtgctcttatgaggaagagtatagggaataggagttaggtggcaaagaactagttcagtgggttggagactaaagcgatggcagtcatgcacctgggaaggactgtaggccaagctgtgctagatcgtcatattaagaaatggatgtgaaagcagaaccttctcccctccatcttgggaatcatttaattgaggaaattacaggtgcttcaaattcagtttcacagtcacatctaagggtagcacaagccaggtttcccagtggattacacagggcatctgaaagtaaatgagtcaaaggacatcaaggtttttggtctgattgactcaggatgatgtcatcgtcagagacaggaaaaggtaaggcagcccagggattcagtattagagctattaaacgggagacgtgtaggaagcactcatgttgagaaatcagaagtcagttggatttgtgagctggaagtcaggagagagactggggaaacaagccatcagtgtgtagctgatacagaggctgcacagtggatgagatcagatgggaagcaaatgtgtggatccagaagaaccaaacctatgcttgccctcctggctgccctggatgcagagactggggcggagaggagcaattagcgggaaaatctgaggagcatctggagactggagaggaaggggtcaaaccatgacgttatggtgtcctagaaacaactgtgaaggaaactggtgaaggaagactgggggactagcgacagtaactgagcatggcgtttagcaacccaaaagtcagtagtgacttggcagggacacaatggagggatgtgaagttggtcatcctaggaggcataaaagagagaggatgggaggaaaagaattagagattttatacacacacacacacatatgtatttgtgtgtaaatatataagacattggtatatatattatatacattatagacagattatatatgatatataatatatgtattttatatagggaaggtatatacaacatagagatttttatgatatatatattatatgtaatatatgcatagttatatgatatattatatgtaatatatggagagattatatatggtatatatgctaaatactatatatattatatagagagaattttttttttttttgttaatcaagacatagtctcaatatatagctctgcttggcccagaactcttttgtagattttggcttaaagagatccacctatctctgccaactgaatgctgggattaatcaccaggttcggtgagtatgggtggagttttttttttttaaataattgtgtatttgttgagcttatagtataattgcatcatctcccattatccttttctcatgccaaaacctttcgtgtatccattttctgcaaataagcaataccctacctgtccttggctcggaagtttaactgtagagataaacttaacaaatgtgttagggaggtgaagagatggctgttcttccagaagcccagagttcagttcccagcgcccacaagggggctcacagccagcggggattcctgtcccagcagatgtgatgtgatgctctctgctggccacctccagtactgcatgactatggtacacagacatacgtgtagacaaaacactcacagtcaatatttttgttaaagaatagttttaatctatagaacgccttgagaactgtggaggcagcatgcggtcttcatcctctgagcgtctctctcaacgcagatgcacctgtgtgatgaattgttagagctccagagtattttttttttaacatttcctcgttttcccccaatattatatgagtctatccaggacttattcctgtgtctccttagactcttccagaatgtttccatgaccttccttttcttcctgatagccttggtcacttaaaatttacatttatttatttatttatttatttatttatttatttattgtgtgtgtctgtgggggtacatgtattctagggtgcacaagtagaggtcagaggacagtttgtgggaatccattctctctttcatttccactgtgtgagctccagggcttaaactcaggttatcaagtttgtttgtttgtttgtttgtttgtttgttgagacagggtttctctgtgtagccctggctgtcctggaactcactctgtagaccaggctggcctcgaactcagaaatccgcctgcctctgcctcccaagtgctgggattaaaagtgtgtgctaccatgctgggttatgtcatcaagtcttgttggcaagtgtcttcatccacggagctatctctctggcctgactttgataattttggagagtgtaagttaggtgctttctaggttatttgttaactggggtccacataatgtttttcatggttaaaaatgggatataaatttttgcgaggtagaccaggggcggtgaatgcactattacaagaggtagcttgaaaactttgtgctaggtggtactggggctaaaggacaagtgttaggagaagtttgagaccccgtacaacactctagtcacactaactctacctgaggggcatccaagtgatgtggaagagcactgatctccacaaaccaaggaaggaaagggaagaagaggtaaacctgggcttcgatgggcttcctcttagagcagtgtccagcctttgctgacaccggctctgggtacaggggtgagtcttcaactttttctgttttccactttgttcttattggcctcttgaggtgtttattatattccaggaaccaaggtcaccaacggaacagagagaacacaacacttacgcaggggtgtgcagtttcaaagcagtgagatcaagccggggtagtctgtcttcacagaagatcagcgtgcctcagagtgtccattgtggtctccgatctgcagatgtattaaagggaggtgggaaaaggggaagggacttgtttggggacacaactggcaagtgacaaagtaagacctagacttgaggcaagtgtaaatcaagcttagagtccttgccaccactggaaagatgctcaagtctgccatacatatttactagtgtgtgctagggagtatctacttggtgagtgttctcagccctcaggtatgaggcctggagtctgttctctgtccttcctgctattaatgcacacagacaaaccagttagtcactgagaacgacactaagtccctttctgacatacggatgagagtgagcttattactgtatttttcttggaaaatggtttttccataagcattaagaaacttacatcttgggctagagcgatggctcagtggttaagaacactgactgctcttccagaggttccaagttcaattcccagcaaccacatggtggctcacaaccatctgcgatgggatccaagtccctcttctggtgtgtttgaagacagctatagtgtactcatgtacacaaaataaatagataaattaagaaaagagaaagaaacttacatctcagccaggcagtggtggtgcacgcctttaatcccagcacttgggaggcagaggcaggtggatctctgtgagtttgaggtcagcctggtctacagagtgagtgccaggatagccaaggctacacagagaaatcctgttttgaaataacaaaaccaaaagagaaaaacaaaacagaaaagtaagaaaaaaatctttacatttttcatttctgaacacatctactctgggaactatgggctaatgaataaatataaaacagaggagatgtttgtattttaacaatatatgaagaacagctacaagtcaatcatgtgaagataaaacagacacacagctcaagactaactaaggactatataggaagggcctatacaggaggagaaaatatcattgatcatcagaaaacacaaattcaatccacaataagatatcgcttcatgcccactggagagtttaagatgtaacactgtgaagtgtccatacgactgtggaaaacatttcctttttatgcagttatggggataaaatccagggcctcacacatgtgtggcaagcacactgagccctgcaagtgggccctgatcctcctgcctca

SEQ ID NO: 151 - DNA, 2193 bp, Mus musculus
ggcccgtcgctctgtagccgcacctctgagctgtccggcaggctcagctgcaggctgtgacactgtggttcgtcatccttccaagcaccatgagaggcccctgctgctggccactctctctgttgctgctcttcctgcagtcctgggaaactcagctccagtctgcaggtcctaggtgctataatgggcccctggatttggtgttcatgattgatagctcccgcagcgtgcgccccttcgagtttgagaccatgaggcagttcctagtgggcctcctccgcagcctggacgtgggtctgaacgccacgcgcgttggggtgatccagtattctagtcaagtgcaaagcgtctttcccctgggcgccttttcgcgccgcgaggacatggaacgagccatccgcgcggtggtgccgctggcgcagggcaccatgaccgggctggcgatccagtacgctatgaacgtggccttcagcgaggccgaaggcgcgcgcccatcggaggagcgagtgccgcgcgtcttggtcatcgtgacagacgggcgacctcaagaccgagtggccgaagtggccgctcaggcgcgcgcccgcggcattgagatctatgcggtaggggtacagcgagctgacgtgggctctcttcgcaccatggcttcgccgccgctggatcagcatgtcttcttagtggagtccttcgatctcatccaggagtttggcctgcagttccagggccgcctgtgcgggaaggacctgtgtgctgagttggttcatggctgccaacacctgtgtgtcaacgccccaggaacattctactgcgcctgcaactctggctacaagctagcaccagataacaagaattgtttggccttggatctctgcgctgaaggaacccatggctgtgaacacctctgtgtcaactccgtggactcgtatttctgtcgttgccgagctggctttgcgctccagcaggaccagaggagctgcagagccattgactactgcagctttggaaaccacagctgccagcatgagtgtgtgagcactttggcggggccacagtgtcgctgcagagagggccacgacctgctacctgatgggagaagctgtcgggtcagggacttctgcaatggtgtggaccatggctgtgagttccagtgtgtgagtgagggtctttccttccactgcctgtgccctgaggggaggcgacttcaggctgatggcaagagctgtgaccggtgccgggagggccacgtggatcttgttctcctggtggatggttccaagagcgtgcgcccacagaacttcgagctggtgaagcgcttcgtgaaccagattgtggatttccttgacgtgtctcccgagggcacacgtgttgggctggtgcagttctccagccgggtgcgcaccgagttccccctgggccgctatggcaccgcagctgaggtgaagcaggcagttttggccgtggagtacatggagcgcggcaccatgacagggctggccctgcgtcacatggtggagcacagcttctctgaggcgcagggcgcgcggcctcgcgacctcaacgtgcctcgcgtgggcttggtgttcactgatggccgctctcaggatgacatttcagtgtgggcagctcgtgccaaagaggaaggcatcgtcatgtatgccgtgggcgtgggtaaggctgtggaggaagagctgcgtgagatcgcatcggaaccatcggagttgcacgtgtcctattctccggactttagcaccatgacgcacctgctggagaatctcaaaggcagcatttgcccagaggagggcattggcgcggggacagagcttcggagtccctgcgaatgcgaaagcctcgtggagttccagggccgcacgctgggggcgctcgagagcctgacgcagaacctggctcggctgacagagcgcctggaggagctggagaaccagctggctagccgaaagtgagggtcgcacgctgtctgagcagccacgcgagaccgaggccgagccccgcagcctggaccgtccaggagggggcgctggcgggccccacgcgctgccttcgagctggcctcacctggaccaggagccagatttaggggatggggatgaggggatggggaggtgctggtggggaaggactgctacactcgccgcgagctttgttggatttctttttttgttttccttttct

SEQ ID NO: 152 - protein, 638 aa, Mus musculus
AVRQAQLQAVTLWFVILPSTMRGPCCWPLSLLLLFLQSWETQLQSAGPRCYNGPLDLVFMIDSSRSVRPFEFETMRQFLVGLLRSLDVQATRVGVIQYSSQVQSVFPLGAFSRREDMERAIRAVVPLAQGTMTGLAIQYAMNVAFSEAEGARPSEERVPRVLVIVTDGRPQDRVAEVAAQARRIEIYAVGVQRADVGSLRTMDPLDQHVFLVESFDLIQEFGLQFQGRLCGKDLCAELVHGCQHLCVNAPGTFYCACNSGYKLAPDNKNCLALDLCAEGTHGCEHLCVNSVDSYFCRCRAGFALQQDQRSCRAIDYCSFGNHSCQHECVSTLAGPQCRCREGHDLLPDGRSCRVRDFCNGVDHGCEFQCVSEGLSFHCLCPEGRRLQADGKSCDRCREGHVDLVLLVDGSKSVRPQNFELVKRFVNQIVDFLDVSPEGTRVGLVQFSSRVRTEFPLGRYGTAAEVKQAVLAVEYMERGTMTGLALRHMVEHSFSEAQGARPRDLNVPRVGLVFTDGRSQDDISVWAARAKEEGIVMYAVGVGKAVEEELREIASEPSELHVSYSPDFSTMTHLLENLKGSICPEEGIGAGTELRSPCECESLVEFQGRTLGALESLTQNLARLTERLEELENQLASRK

SEQ ID NO: 153 - DNA, 35075 bp, Homo sapiens
atttcctctcctctgcgtattgttcgtttcttttttctcatgggactttccataccctgggggaggagttttacaagaaatgagctcttccttaggagggcaagctcttctccagagggttagaacctagaacccacatttcagaccagttttcccatcaggcaccaccagaggctggtgcaggtagctggcacccatgatacttatctgtgtccttgattccaatagcccaagccagtgttctgcctggtttttttttccttccctataaagcacagactgggtagagtggtacctagggtgggtaggctggtggggaatagattgtgattctgtccatcagccccatgcagagaggcccccctctcaactacattactgcccagtcaatcccaggagttctgcccagggctatcctgggaaagctttgttttgaaagggtcccgtggtcacctctgggcctggggtgcacccttgcttgggatggagagatagctagtagggtaacaaccccagggcagggacagggactcaggatgccagctgcctctgcaccctgttcctcctctagaaaacgtccaaaaggtaggctctctgctccatcagacttgtggttcttttctttctgtgcaggtcccctcttttgtgtgttggtgcgagggttgggggaggcacacttggggaggtggctcatacagaccaaactctgccttggataggattgattttaatgcagctgtagaatccctgatcctcaggactgcgtcctgctgggcctgtgggagaagtgactgggggggacagttaaggcggcaagacctcatcactgtccaggcacctgcccagccaccaaatctgtggaccagggagcaaacacaggcaagggtactatgcctggctgcagtcagagagagtctcgggaggagcaggtctttgtgctctagggcaggacacagtgctctaggtgggaactggtgccccaggtgggaccgaattccccaggtgagacttagagagacccggtgctccaggtggatctaatattccaggaaggacctggtgctccagggtcctgatgccccaagagcttgccccctatgcctggatgtgtgaagctgtgtgttttctcttcaagaggggacacagatgcctggagggtaaatgtcccaaacttggctcctcggggcatgtaaaattgtgtgtgagaggcagggagagctgaagagagaaaaggacagaaggatagggacacgcacataggtctgtagactaagtactgagggggaagggagagagagagaggtttagagacagagtgagaagaaatgaagacagggagagccatacacgacggacacaaagacagcaccactcaggtcttgtcttcctgtatgtgtaaggacaagggagggagtgagccgggtaagacccaccaggcccggtttctagggtgagccttcagctgcccttctgcagcaaaggggcaaggaagcagggcctagaacccagaaacacgtccccgcgcctggcgcgggcgcagccctccagggtgggcagccggggctaccgggcgcgcctaagtctggatgaagaggtggaagttggtgcgcgtgaactcctgatggatgctctccaggagcgcgtcggcgtcggtggcgggctcggggacgccggggtgacccggccgcacgctgtattccggggtgtaggtgaaggagaaggcactagggtagaagagcccgtcggcgcgcaccaggctcatggggattgtgatgggagcgcgcagccagcgccagtcgctgcagaaggccgccacgtccggcaccacgcacaccagggaccgcgggctcctgggggtggagcaccagggtgagggctgcggcgactccgacgacgcgtgcacccccttcccctgctccccggggcccaagagaggctgcctcaccaccccgtacctgtacatggtttctgcctccacgtccccaaaccacaccttgagccccgcgtggaagttctctccgtggagctccagcgtggccacgtcgcccccgccgctcagctgggggagggtgggaccaggtgaggtgagagaaccaagtagggcgggaacccgctgccccccactcactagcaccaccactgcccagtgcaggcagggtccccctgcccaacgcccctagcgcccggcttcacctctagggtgctgatgagaggcaccggagtgaccggctccagggtacacgccaggctggtgctgaaggaaaattccaccgactcggtgccgatgatggtccagcaagagctgtcgttaagcagagccctgttcgcctccttggggcagggagaggcctgggaggagacccaaggggacgaggccgaagcttctcatggtggccaccagtgtagggagccagcatggcgcgtgggcttctgcgttagaccgaactggatactaatcctaggctctggggttcacttgtcccctcagcttggacagtgcccttaagttctctcacttagcgttaagaaagcttgttgagctagctgatttcttctttcttctttcttctttcttttttctttattttccttccttccttccttttctttttctttccctttctctctcttttttcctttctttctttttctttctttccttccttccttttctttctttccctttctctttttcttttctttttcttttctttctttctttctttttctttctctctctctctttctctcttcttccttccttccttcctttcttcctttttttttttttgagactgaatctcgctctgtcgcccaggctggagtgcaatggcctgatcttggctcactgcaacctccgcctcccgggttcaaatgattctcctgcctcaggcgcccgggtagctgggattacaggtgccagccaccacacccaaataatttttttgtatttttagtagagacagggtttcaccatgttggccaggctggtctcaaactcctggcctcgtgatcctcctgcctcagcctcccaaagtattgtgactacaggcatgagccattggcccggcctgggatagctgatttctaagggtcttttttcttgggattccagaatttttttttttttaacattgtgcaattctatgctctaataatctacaattttaatattctttgggaaggaatattcttggggaaggaataatacttgctattttccacatattataattctatctcgtaacattctatgataatattcttttgggagtactactgcttaacgataattattattttccacattctataattttccacattctgtgtctttatctgtgcttcgaatagtctttgctcattaattctctgctctctattacctatcatgatttttatttacatcctacaattttatatcccaatttatttacttactttttttgagatggagtcttgctcttgtcacccaggctggagtgcaatggtgtgatcctggctcactgcaacctccacctctcaggttcaagcaattctcctgcctcagcctcctgagtagctgagattacaggcgcccactgccatgcccagctaatttttgtatttttagtagagatgggatttcaccatgttggccagtctagtctcgaactcctgacctcaggtgttctgcccacctcagcctcgcaaagtgctgggattacaggcatgagccaccgcacctggctatatcccaatattttatgactctaaaattctttgggaaggaatattgcttcatactattacttattactatttttctacatcctatgattctgtcctgggagtctatgattttaatgttccatgggaggctgctcaggaagtagcaaccatggtgagggtgatgatcttacattctgtggttctctgcattctccctttccaggacacttggtgctggtattctctgcttcttacctgaaattgcaccaccttctctgtggcaaggcataagtaggtgccaccccctcctgggggactgcctggaaactggaatgcacacttgtgcagctgggagatgggctcatccacatcaaggagcgcacactgttttgctactttacggatgatctgcaatggaaggatggtaagaacagtggtggcaaggagcccgggcgtccagaggctgccctcctagccggctgtctgctactccaatagccacacaggcactagcagattccccctgccctttgacttctgtctggtcctacgcgacactgggtgagaacaggtgtctccatgccttggggcctcactctccagccctgcccgtgtgtgccacattctctgcatggatctgaggggacccctccaggcatgccctcccttcctataccatgggaggtagtgtgatgccggtgaccgtgcagacgagctgcaccagggagccatagcgaacgtagccctctcgcggtgggaagtctccttgggcagagtgcccatcagctgggggacaaaaaaagcaagggacaaggttttcagcggcccccaagcttctgccttaaaccctgccttgttgcctctggctcttcctcacatcacacatgggccctgcgggaaagcttggtactcaggggagccaactgaaggttctaattctggagaggccatttgaggccatcctcacaaatgtctgccctgggggcaggggttgggggcaggcagcttagttgatatatggggaaagggcatggataagggagtcagaatagcttggaacagtcaccagctcactgggactgtagtcaagtatttttgtgtttctgagccttaatcacatggggcagagtttaccttccttaaggagttgtggtggaggttaaataagctaatgcatgtgaagtgcccagctccagggcctgcagatgtcattacccaggtggagcgtgaaggcagcccactgtcgtgcactggccacaaaggccccatcctccacagagaggtagcgtgtggagaccgtctgagagcgcaggcggttgaagagggagacctttgagccggaggatatgcacactgtgagggtgagggtcagggttagggtgagggtgagggtcagggttagggtgaggggatagggttagggttaggattggggttagggttagggtgagggttagggtgagggtgagggttaggattagggtgagggttagagtgagggtgagggtaaggattaggattagggtgagggttagggtgagggagggggtcagggtgagggttaaggttagttggtgctatcagtgccctgtcctggcttggttccttggactttccagacagtttccaatcttctgtccctgtgccggcctggctaatgtgcccacaggcctagatacactgggcattcccagttcacagctgtttttccaggacctgctgcagtcctgctttggaacctttgcctgttcctttgctgtctggacatctttcagttcaacaaacaaaagtaaaacttttttttttttttttgagatagcatctcaccctgtcacccaggctggactgccgtggtgctatcacagctcactgcagcctcgacctcttgggttcaagtgatcttctgatctcagcctcccacgtagctgggacaacaagtgcaggccaccatgccaggctaatttttctttttctttttttttttttttttttggtagagacaagatttcgccatgttgccctagctagtcttgaacttctgggatcaactgatccgcccaccttggcctcccaaattgttgggattacaggcatgagccaccgtgccccacctatgtcacttttagtctgtccctagttcaactcctgcctagttcaacttttgtctgctctgggaccccaactcccaacctggaatttggtatctgtccctttcctctctgcttttcatccttcaactcttctcatccccaggcctgggccgcacccactcatccagactccttcccctctcggctccgactccaccttttccactctgacccctaagcccagcctacccccacctccgcgccccagtttagccgttctgggcttggttgcacctccccgcccgggccgggggtcaggccccgccctgctcacgatcggtgtttttcagcgactgcttcttctgcgagggcttcgagatgaccttgataaggcggctgtggaaggtacccagctcccggcccccgcgcagcaccagccgcagcaccagccgaaagtgcttcctcttgtctgcatctgagatgtacagggtcttggcgcagccgaattcctagggggctcacaggtacagggccatctcatcccagccctcccccgtcggatgaaccaacctctcccagatatcggacgtccgccccgtcggaggtgaccagaagctccaccatccaggctctcaggctcggccttaaggcaggaccccggcctcccggtctccccacctatctcttggctttcggaggggagtaaaggagccctcctttcccaggagaggcagggatgggagcaggaatcggaccccttcccgtgcgctctcaccctggagtccggctgctgctcgaaattcagcttctgcgtctcagtggcgctgccggacgcgctgtccagtcccatgtaaccgcagaccgtgggccccgtttcccccgcctggtgagctggaaagggacgcgaactggctctgcaaggactcgggaggacgcaggtgccaggcaagcttagcgctcgccgccagagggcgcggggagactgcgcctgcgaaccgccccgtctcgggcccaatctcgtggtcctccctacagagcaggcggccggcagcccttgattccgccctcaccttgatcctgccctggcttcaccctccagccaggccccgagaggtagacacagggcggggggcagaagaacctgcggagataagtgagtgttggagtcgtgcatccatctccacttggctctcctgtaagcacggcaaggtagtagcataaacccagcagaaccttcgtttcctcctcccgctccccccaacgctttttcacgactgtaaaccccattcatagccaaaccttattgtttttacacccctcattcaactcatcagaaggtcctgtccactccaccttcaaaatataatatatccagaatccactggcttcttaccacctcgcccttcatcccagccgccattactttttgcctggaccacagcatcagccttcaaactggtctatttccagaaagttctgtttctatctccttcccatttcgcacagcagccagagtgctccttccttccttccttcctctctctttctttctttttttctttcattccttccttcctgtttctttctttttctttttctttttttttttttttgaggcagggtcttgctctgttgcccaggctggaatgcagtaacttgatctcggctgtctgggctcactgcaacttctgcctccccaactgatcctcccacctcggcctcctgagtaggtgagactacagacacaagccaccacacccatctaatttttgtgttttttgtacagacatggttttgtcatgttgcccatgcaggtctggaacttctgggctcaagcaatctgcccacctgggtctgccgaagtgctgggattacagggatgagccaccaggctggccagagtgttttgttaaaaacatgagtcacatcatgttaactccttaaaatcctccactggtttaaaattcaaagtcctcctgagatctgacccctgcttacctctctgacttgtttcctacaactcctccctctgatttcagccactgtcatttcttttgtacctcaaacaggcctaattggtacagcctcaaggtcttcccattttctgttgccctttttttttttgagactgagtcttgctctgtcgccaggctggagtgcagtggcatgatctcggctcactgcaacctccgcctcccgggttcaaccaattatcctgcctcagcctcctgagcagctgggattacaggtgcccgccaccatgcccagctaattttgtattttttggtagagagggggtttcactgtattggccaggctggtctcgaactcctgacctcaggtgatccgcccgcctcggcctcccaaagtgctgggattacaggtgtgagccatcgcgcccggcccttctgttccttctaattgtagcacgctttccccagatattctcctgtctggctccatttcagcattcaagtttcagttccaatgttacctcccaaaaggtctctcaacctccttgacctttctagctaatgtcccccctgccttcagtttccgtcaaatggcctcgttcagttttccttctagtgctcatcataatctgcaagtatcttgtttcctgacttgtggggagtttactgtctgtctcttccacacttgagtgagagtgtgggctacagagcaggggctgtttctgtcttgttcagctgtatgcccagtgcccagcagtacccacagagcctggtgcatacatgacaaacactcagtaagtagttgttgaatgaatgaataagtgaatcaatgggagaatgagtgaatgaatggagacaggagattcacagggaatctcctgctgtagaactatagaccaaagtgggggctaatggtggctgagggtcaaggccctggtcgaccaatagctgagatctcagccctgaggcctgctctgcgtctaaaagaggcccaatgggtggatggaggaggtgcatagggctgacagttgcagagacctgggaggggctgcggaggcacctaccgcttctcatttccgtatgatttctgggccaccttggcatgcaggatccgcacagtctgttcacactgttgctgcaggcacctgcgcacgcctcccctcagaatggtggtgtgctctggggatgacctgggagtagggcaggcaggtcgaccagccacaggagggagaagggtcaaggtggcacagggtccaagcactcaggttgagtaaaatgaagtgagcagggggttagagtgagtgggagggtggggctgctctatatcctgcccctgtggggtcaggaagaggaagcattaggtaaggaggagacttggctgcaaattgtaggctaaatatttaggctgcaaggtgctcaacgaagcctgcatggaacccatgggaccacccaggttccactctgtgggtctggcatcatgcccattggagcccagggccatagggacacgtggctgtgacacaaaggctgcacttatactggccttgggatggagaagagtattttagggctgatggaattggtagagatgaagcttccccaccctggggaaggcagggtggggggtgaggagggaggggaagggagagcctttcctgggctcctggcctggagcgctctctagcctcctgcctgcaaacagaaaagggcccaaaaccttgtcctcaggatgggggatggcctgggggaatctgagcctttctggggccaaagccatattcttccctttctcccatgagaagtggcctgttgctgtgtgggctttcctacccttgattacaggagtcaaggcagatgacattggtcctgcagagtgagccaggttagagcctagaggtctggtggcttcttaacctgggggtcttgagcggtgtgggtgggtaggcccgagcaattgcagggagcaagtagaggaggggaggtgggagagatttggggggttagcaggttgaggcccaaggagagccatgaaaactgaggctgtccttctgagcccttattcctcttggcaggaccagagtctctcctcactcctggaggggacagcgcaagaccgcaccctcgaaagccaggccagacaggcagcagccacagccaggaccgctccaccccttggggctctcctcagggaagtgccttctaagcttccaatgaattccggctgtggagtgtggctgccccggtctccccagtctcccgctgtagctgacttccagcctggcccgcagctagccctgtctgcagctccaagcgtggtaggagcagggggtgctgggtttgccccccctcaggaggaaggggggatccctccctgccagtgggaggggttgcagcctgcacttccccctccccacccgccagccctgggttaaatgcggccgttgcctctgtgtgctccagctgcctggcagtccccacctagggcacgctgccacgccgccgttacctggtccaagtgcccgggaggctccgcctgtcggcttcgctctgcagctgcatctctgatctgtcctgcaggctcaggtgagtcaaaggattgggaggcactgaggggtctgcaggggagtaggcatcaagccaggtcaggcgagtgtattttagcagagacgctgcctagggtgccctatctgatttgcagtgcccttccccacttctgcagggtcctttccaaatcgagcccccaccctcaaagccatcaaaataggatcatcccttttctactctcatccctccaggaaccccctgaaatgtccctaagggacttttgagaatttatttacaggcctctcctcccttgctgctccactccctcaacctcacctcagggcatctctgaatctttctttttttaatgcaaggattaactcctcagaggaatcccaggttctagtatcagtcctgccacgacatcgccatgtacccttcagcaagacactaccctctctggacctagttcctttctttgtagaatgaggggtttggaaaggtgatgaactttgaggcatttgctattttgactttctaggattcctggggtggaggcagggtgccaggtgagaagttggctcagactaagaatgggatgaggggaaccttaaccaagatttaggggcccagaggcatctccgggtaggaaagtatgggaggtggcagaggccccttgtgccttagccctcatgctgcccagggatgttggctttgcctgtggcccaagcttgacaagggttccccgccctcccacttccaccagcgctgccacatcttgcttggtcaccctcccacgacgggccctgccagaggatttatgttcttctaccaggcctgggaggggaaaagggagaagaatccgggatgagaaggtcgcctggagtgagaagcaggcactggcctcgctcagaataggcgcattcacggaattggggggcgggggcggagctgctgttgggttaggggcagctggccctctctgccaagaaacagcaacagaaaaatggctaacacagcttcagcatggggcgcggcggtggggtaggagctggaaggaaatgaggtttagtgaattctaggcgccagggggcctcaagagagagaaggggaaccaggagccctaggttctaatcctgcttttgcagttcggcgggctgcctccttggggcttagttttcctatttgtatagtggggagggggtgggggggtggtccttcgtagttctcacggggcgtctccggggcctcgggagggtaagcgctcacctgctgcccctgcggggtccatggtggctccacggggccccagccgctcacccgccgccctctggacgagtccagtgctgctgtcgctggaaccctgcacacccctgctcctcggctcttgcgcgggttatatcctgtccaggccttatctccaaggccccgggccccggccccctgtttgctcggggtgggcgcacctgctgggcagatgtgggcttcccacgccccctgccatctcgggcgccccctggcggtcgctcctgagagcaggcgggaaacaggcgccaagccgcgcgttctcgtgcgcagtgggttttggtccactcgctgccacgccaccacgctcagccccgcaacagggcgcagcccctccctgccgcctgcggttgggcagtgcatgtctgtgtttgtgtgtgtggaggggtctgggggggttggcgagttgcaaagacagccacacagaagcctgtgtgcgtaggggagtgggccgaggtggggaagggcttctgtctgcagaggttcgcctggcaggaggagaggcaccaaacgcccaggctggctcacagaaactagcaggcgtgggattgtatcctgccgcagccactttttggccgaatgactttgggtaccagcgcttaacttttctgagcctcaatttcattgtctgtatgatgggggacaatcacagccttagtcttacaattgcagagaggattaaatgccacaatgcgtgaagagcatttaacactgtgcctgacatttaaggaagacctgtttttttctgtttaaattttgcatatttgtatctatgtatctattcttatttaccattctcttgtgggccgagcgcggtggctcacgcctgtaatcccagcattctgggaggccgaggtgggaggatcacctgaggtcaggagtttgagaccagcctgaccaacatggcaaaacccgctctctactaaaaatacaaaaaattagccaggtgtggtggcaggagcctgtaatcccagctactcgggaggctgaggccggagaatcgcttgaacctgggaggcagaggttgcagtgagccgagatcatgccactgcactccagccgggacgacagagcaagactctatctaaaaaaaaaaaaaaaaaaaaaaaaaaaagaatctcttgtgtttcccagcaatcccactgtgatgagaattttttaattctgaaacatttcaaacatacacaaaaatagagagattagtaaaataaacctgtaactgtcttccccctccaagtgcctatcacccagaataagagctctgtaaatactgttgcttttctattttccttcctccctccaggctctgacacctccattctctgtccccaagcgccatgagaggccttctttgctggcccgtgttgctgctccttcttcagccctgggaaacccagctccagttgacaggtgaactggggcccagccctcaccagtgggaggaggggagcggaagcaggtcctccctctgcagccagctcctcctgctggggagagggaagcaagggctttggaacatatgggactgggtttaagttccccacttcacctttctgggcctcagtttcttcatctgtaggatgtggcttagttttgggcgcatgcagaactgcccatggggtgtttaatttggaaaaattatttgaaaacatggaaaaaaaccaggaaattttacataaaaatccctgtttagtatttctcttgaaaaaccagggatctgctgacatccaattcgcaggggcatggcctcatttggatgcagctacctgcccaatttaggagtgataggggctctttgggtctccagcgtcctaacccaaccagttcatccatgttccctgcctggtccctgcaggctttgagtttgcgacgcttccttgccccctcgtcaatgggtaataccgcctcagaatagccctcagatctgtaagatgagggaatttgtgaaatctcctagcccaggtgctaggcacatgccgggcgagtgcatctgtctaatctgcgtttgctgtgctgggcgctgttatgtcggcatagcggcatttcccctgggtttcctagggggtctcctcggaggtgaggctttgctgacctaggagagtcctccctgatctccccgcaggtcccaggtgtcacactgggcccctggatctggtgttcgtgattgacagctcccgcagcgtgcgccctttcgagttcgagaccatgcggcagttcctcatgggcctcctccgaggcctgaacgtgggtcccaacgccacgcgcgttggcgtgatccagtattcgagtcaagtgcagagcgtcttccctctccgcgcgttctctcgccgcgaggacatggagcgcgccatccgcgacctggtgcctctggcgcaaggcaccatgacgggactggcaatccagtacgccatgaacgtggccttcagtgtggccgagggcgcgcgaccgccagaggagcgcgtgccgcgtgtcgctgtcatcgtgacagacgggcggccccaggaccgcgtggccgaggtggcggcacaggcgcgcgcccgcggcattgaaatttacgcggtgggggtgcagcgcgcggacgtgggctccctgcgcgccatggcatcgcccccgctagacgagcacgtcttcctcgtagagtccttcgacctcatccaggagttcggcctgcagttccagagccggctgtgtggtgagttaggagggcgctggagtgaagctcgaactctcaatccaaatgcttggattcctttcccaccacagtaaatcccatcccgtgggggtggccccgcgatttccaggtagagttgccctgacctaccgcaggctgtgtcagatttcagctctgaccacttctgctcagcctccatcaacaaggagcaacctataatttcttgccctacccgccacagcttaccacaggcttaatgtcaaattccagcaccaaccccctgcacacacggaaccagtgattctcaaagctaagagggatcggctgctccaaagagtcgtggccctcccacatggggatgacttctcccattatcatcttagctcctcccacaaatgctgcaagatctgttctgatctgttttgagtttattccgcccacctcgacttagcacctctccaccttcctacccactcctgcccctgtgtagtcctgtcccagcccactgacgtgtctaattgagtgtctcctcttctgagcctactcacaggggctccttaagccttattctttccctaagccctctcacttggtacggcccttctcaaattagtcatttccttctgaaagccatttgagggtgatgcctgcctctgaccccatccccatccagctctctcttgttggaggcttctgcccatctgttccctactgattctagtcctgtgtgtcctcagggaaggaccagtgtgctgaggggggacatggttgccagcaccaatgtgtcaatgcctgggccatgttccactgcacctgcaacccaggctacaagctagcagcagataacaagagctgtttggatgacagctatccctgtcctgcaatctcactgctcctgaaccttctttggctctccattgccccaacatcagaccaatgagtctggaagggcctttggcagtaaaagcacacctccatcactttacaggcctaagaaagaaaggtattgcctggggtcacataagtccctggtgggagcccacagttcagtgtgctttctgccctctttctccctgttttcaggccagtctctaatcaacctcccaaacttgtttctgttttcttcttttcttttctctctctttttttttttttttttttgagacagagtctggctctattgcccaagctggagtgcaatggtgcgatcttagctcactgcaacctccgcctcccgggttcaagtgattcttgtgtgtcagcctcccaagtagctgggattacaggtgctggccaccacacccagctattttttgtatttttagtggagatggggtttcaccatgttggctaggctggtctcgaactcctgacctcaagtgatctgcccgccttggcctcccaaagtgctgggattacaggcgtgagccactgcgcccggccatttctgtcttcttacaggcacatccttacggtttctcttcttagatactgttggggggtcttcaattaggtgggtgtcccccctcatgccacccattcttgactctgcacctcagctctttgtgtgctgctcacctgagctgcccttgccactcccctctgcctttgcaaatctttcaagactctctctttttaagagatagggccttgctatgttgcccaggctggtctcacactcctgggctcaagagatcctcccgccttggcctctcaaagtgctgggattacaggtgtgagctgcttcttcatttttgtcttctgaaaagctatggcatagaataccttgcttattcaattcagttttttactgagtaccaagttagtattagacattgtgctaggagcattacacatgttattatctctcagcctcacaacaacctggaaaaagaaatcatgtaatcccaataacccagatgtcagctggggtcttcttgtttctagaaactaaaagttggcttgaactctgatttgatgactgtttaacattcaaatctctctccaagacctctggaaatcccccaagtgcttatcttctggttgtcacctcttgctgtgagcctctgctaaattcatttgatttatggatcctctctcatttctcaaccctgcacatgctgttcttgttccatgcatgttaatcaacctcttcgttggtttacacacttgtgtatgcaggggcatacacaagcgtgtatgtgctaagtaactcatagcgcgtgcacacacacacgaaaaactcattataattgaatattagacagctttgtttctgaaagtcctcagtcagcctagtacaagggatttttcacaggcagcctcaacccacagagttactcatcttcatactggctctcttgttcttttttttttttttctttcctctctccactctcatctcctttccaggaaccccaaatactcacttttttatacagggtaattatcttctctccagtccagctctcggccatctttgcctatccagatcatcaagatgctcaacagggcaatagttccccatcttccatggaaggaagctgtgaatagcaatcactgtcttccattatattcccattttgcaaatagaaaaatggaggctcaaataggtaaagtggccaaacctgtcctctgtaagtcagagagcatcttgaggacaggggccctgactaattaggtcaggatttttggggttggggcccaggcgtaggtattctttaaaatttccttaggtggttgtgctaccagagctgagaagggcagtcctgggcatagactgaccccatttcttcctcagccattgatctgtgtgctgaagggacccatggatgtgagcaccactgcgtcaattccccaggctcctatttctgtcactgccaagttggctttgtactccagcaggaccagaggagctgcaggggtgagcaacacccccaccctcccaccacaccctggactgtggcctccgagggctccaatcagaggcaacatcttgctgtttcttccctcctgccagccattgactactgcagctttgggaaccatagctgtcagcatgagtgtgttagcacccctggtgggccacggtgccactgcagagagggccatgacttgcagcctgatgggaggagctgtcagggtgaggagggctctcctacatttgtgggaggggtaagagatcttagctggtggggtccatcctgactcatcctgacctgtctctcctttcagtccgggacctttgcaatggcgtggaccatggctgtgagttccagtgtgtgagcgagggcctctcctaccgctgcctgtgccccgaggggcggcaacttcaggcagatggcaagagctgcaaccgtgagtgatgggcgggagggtgttctgttggcttctgccccattgcccacattcggagtgtccttgactttgccattgctgtggcccctaggctgtggtgtgaatgtctgtgtgtgttgtgggggtgacattggagggtgtgccattccctccttccatctctttcctacaatcctctactctgctgtcaatgttaatttaaaaatacatatttgatcacattcctcctttgtgcacaagccttctgtggctcaccaatgactacaggagaaagatcaaatgacttacccctaagtatttcaaatggtgagcagaaccacattaatgaataatgaaatcaaattactgggttacaaccaacattaaaaaaaaaagagtggaagacaatatagagtttactgcctgtagaaagagttatattatttctgaaattttagttctgtgtgaaatgtctcatgatgtattgtcattattattatttttactgtgggctgtgataaaaattttgaaaccactgccttaggtcatcacgatctagcttcagccaactccatctgcccatctcctgccacacttgaacatttcagtcttactggcctgcccctccccggatgtgtcaggatctccccagatcccaagcctctgcacgtgctgcatctcaccttctagactgtcccttactgccttggcaaactcctactgatctttcaagactgtcttagatcattcaggctgctatatcaaagtactgtagactagacatttagttttcacaattctggaggctgaggagtccaagaccaaggtgccagcagatatggtgtctaatgaaggcctgttttctgattcttagatggcacacctttcaaagcctccccacgccaacacacacacacacacacacacacacacaccaattttcttgctgtgtcctcacatggtgaagacaggaagcaagccctcttcgactcttttttttttttttttttttttgagactaagtctccctctgtttctcgggctggagtgcagtggcgcgatgtcggctcactgcaacctctgcctctggggctcaactgattctcctgttacagcctctggagtagctgagactacaggtgtgccccaccatgcttggctaatttttgtatttttagtggagatggggttttgccatctcagccaggctggtctcgaactcctaacctcaagtgatctgcccgcctcagcctcccaaagtgctgggagccaccatgcctgacctcttcagactcttacaaggacagtaattttactcataagcgctgtaccctcatgtcctcatctaatcctaattaacctccaaagatctcacctccggagactatcacataaaggcgtagggtttcaataaatgaattttgggaaacacactcattcagttcataacaaagatcagatagaaggccatcatctccatgcagccttccttaacaactccaggaagaatacactattcctaccttgggatccctgcatgatcttctcttctagcactttccttgaccagagcacatagcatgtctgacttgctctgctctgtcctcatggaacaggattatgttttaattatttcaaaacctttgaaaacctccccacgccaacacacaccacattttgggcctagcaactttcctggctcagaataggggaggtgacattgtagagtcattcaggagcatgggttttggagtcagatggacctggcttcatgtcttggctcagtcagtactagctatgaaatctggggcaatcactttatccatcagaacctcaggtcatagaaaatggggacaatattcaagcttattgggaggattgagaatatatataagcacttcacccagtacctaccacatggtaagctgtcggtaaataatgtttttgttattattattgttaatactggtagagtgcttagaagtgtgcctgatacatagtagatgatcaataaatggtagttattgtggtcattactatgattgttgttaaaaaaagatgcttttagcagagtggtttgttctaagcactgaataaatgtcaagggcgatgatgagggtgatgatgatggtgatggtgatgatgatggtgataattattattacttagcacactgcctggcacaggaaggactcaggaaatgttgtctgttatataataaatgtttgcgaatgaacgactagatggatagacagctgctgccagtccagaatctggtccctcaattcaagcttttctggctgtgcagggtgccgggaaggccacgtggaccttgttctgctggttgatggctccaagagcgtgcgtccacaaaacttcgagctagtgaagcgcttcgtgaaccagattgtggacttcctagatgtgtcccccgagggcacgcgggtggggctggtgcagttctcgagccgcgtgcgcaccgagttccctctgggtcgctacggcaccgcagccgaggtgaagcaggcggtcctggccgtggagtacatggaacgcggcaccatgacagggctggcgttgcggcacatggtggagcacagcttctccgaggcgcagggtgcacggccccgtgcccttaacgtgcctcgtgttggcctggtcttcacggatggccgctcccaggatgacatctcggtgtgggcagcgcgcgccaaggaggaaggtgggcttggcatgggacacagtgggctggggttgggtcagacgctgggaggcagctttcccgaggcctggggcaccctctgagaccccggccttgcaggcatcgtcatgtacgccgtgggcgtgggcaaggcggtggaggcggagctgcgcgagatcgcctcggagccagcggaactgcacgtgtcctatgccccggacttcggcaccatgacgcacctgctggagaacctcagaggcagcatctgtccaggtgagcgcatctctctcggggctcctcctctctctcattgcccgtcctctgatatctccccttcctattcactccctgcccactttgtagttatagccagaggttgggctcactagacagagctttgctactccaaatgtggtctgcaggccagcggcagggcggtcacccggtagcttcttagaactgaaacatttctggtgctctccagaccgaatgaatcagaatttccacttcgacaagattctcaggtgatttgtaagcatattaaagtctaagaaatcctagactaggctacctgtcccccaaatcagtggaggttcagaataatttgggaaatttttttgaaggcacaccagacagcatttgtaagtggagccacagcatatatccctgaacttgttagaattcaaccttatgaacttggcaaagtggcaggactgaatatattttaagtatgcaaagactttttttttttttattggggacaacatacctcataagtgcaatccctctacttcatcatctggtgctcagctgaggaaaaagagactgactctacctgtgaagaaggggactcttgaatcgcatgcagtgtactgtgctctaggtgatacagggaatgtctccagggtaacttttaccctagagactttagacactagcccaggcttaagatgtgactcttcttcccatttatcagactgcagctccagaaacagactaagtagggctggtttgggtctggagaatttgcctttttttttttttagatatatgtaggggggctgggcgcagtggctcacatctgtaatcccagcactctgggaggccgaggcggctggatcacttgagatcaggagttcgagaccatccttggcaacatggtgaaaccctgtctttaccaaaaaatacaaaaattagccgggcaaggtggtgggcactgaggcaggagaattgcttgaacctgggaggtggaggttgcagtgagccgagattgcaccactgcactccagcctggtgacagagtgagaccctgtctcaaaaaaagtatatataatatactatatatactatattatataatatgtgtttgtgtatgcatgcacatgcacgtgcatgtatatacatatacaaatatacacatacagtccttcccccaactctccttccctccccgctctcagccaattctaattattgtggctctttcagattaggggctctttcagagctcttcctatgtgactcttatgggccctgcagtgtgactttggacgagtcacttaccccacacctaccttaacttttctcttcggtaacaggagaggcactggctgcccaaggttacctctagttctagagttctaagagaagtctgggttttgtggttgaagctctttatcaattggtggtatgactgttccctgtctccaaccctttgtttagagaaacaaatctgtgaagttaggggtctttgctggattccagcagtttgttcatagtacatataagactaagatgaagagacaacttttaaatcattatggcagtgttttcaaaggttaaatggcaggtattgtgcttattatttcaccacctgtaatcctttttcttttttttcctaaggtacttttattgtagcatttttttttctatgtcattccctgtaatctttttttttttttttttttttttttttgagatggagtctcgctctgtcatccaggctggagtgcagtggtgcgatctcggcttactgcaacctctgcctgccaggttcaagcgattctcctgcctcagcctctcgagtagctgggacaacaggcgcatgccaccacgcccggctaattttttctagttttagtagagatggggtttcaccgtgttagccaggatggtcttgatctcctgacctcgtgatccacccgcctcagcctcccaaagtgctgggattacaggtgtgagccacagcacctggcctccctgtaatcttaacaatggcacatgcttatagaatttcagtgaatctaagataccattcattttaagattcatcactaccttatgtactgctaagaaaaaacatgtgccagttttaattgtaaggcctcctgcccaacccccaagatgttgatgtgtggggagatagagttggatcaggatcagtggttcctaaaaattaggtcacaccagaatcacctggtggacctttaaaaacacaaattgcagctgggcatgatggctcatggctgtaatcccagcactttgggaggccgaggtgggcagatcacaaggtcaggggatcgagaccatcctggctaacacagtgaaaccccgtctctactaaaaatacaaaaaattagcagggcatggtggcacatgcctgtaatcccagctactcgggaggctgaggcaggagaatcacttgaacccaggaggcagaggttgcagtgagccaagattgcaccactgcactccagcctgggagacagagctcaaaaaacaaaacaaaaacaaacacaaattgctgggcttcaactctagattttctaattcagcaagtctggggtgttgtctgataattagcatttttgataaattcctacacgatgccgatgctgctggtccaaggaccacactttgagaatcactggtctagttgaaatacactataaagcagtggtttccaacctttttggcaccaggcagtggttttacggaagacaatatttccatgatggtggtggggagaatggttttgggatggttcaagcacattacatttattgtgcactttatttctattattacattgtaatatacaatgaaataattatacaactcaccataatgtataatcagtgggagccctcagcttgttttcctgcagctagatggtgccatccgtgggtgatgggagacagtgacagatcatcaggcattagattttcataagaagcctgcaacctagatccctcacatgcacagtttacaatagggtttgtgctcccatgagaatctaacaatgccactgatctgacaggaaaggagctcaggttgtaataggagcaatgaggagcggctataaatacagatgaagctcccttgcatgctggctgctcacctcctgctgtgtggcccagttcctaacaggccatgggctggtactggtccatgtaatgtgctggtactggtccatggcctggggattggggacccctgctgtaaagtatttacttgaaccaggcagtgttctagatctgtgctttttcaaaaaggtaggcagtacctatttaattacaattgattaaaataaaatacattttagtcctttagtagcaccagtcatatttgaagtgttaaacagccacatgtggcttgtagctactgctttggacagggcagatgtagaacactttcatcattgcataaaattttatttggagagtgctacacaaagtgtggtccacagaccaggagcatcagcatcatttgggagcttattagaaatgtaccttctgagcttcttctccattctgaagcagaatctatattttaacaagctctcctgatgattccaatgagcattaaggtttgagaaacagtcttgtaagttgtgcgtgagacacacacacacacacacacgtacacaggtgaatgaatcctcgaagccactaatgcgtacactctttcattatatccattttatagatgagaaaactgagcttagaaaggttagtgagtttttcagtatctcacagctacttagcttgggactcagcccaggtctctctaaatccaaagcccatatactcaaccataggcccagtgcagggaaatcagagggccaaagctagggcaatttctcatccccctgaccctctgtgtccggcttgcagaggagggcatcagcgcagggacagagcttcggagcccatgcgaatgcgaaagcctcgtggagttccagggccgcacgctgggggcgctcgagagcctgacgctgaaccatatcctttggggctggtggcgcgggctggagggaaagtgaagggacctcggcgaaccccaacggcctccttaaccgctcactggcccagctgacggcgcgcctggaggatctggagaaccagctggccaaccagaagtgagggccacggacggcccagacccgggctggggcgcggcaccacggacggtgccccttgcgcgccatcggtgcgccggggccaggcagaacctgggcccgtccggcttgggctgtcggggcggaggcgctggcgggcttccggcattgagctgagttggcctcgcccggaccattaggcggactgcggcgtcagggggatagcgggtggtgagggaaggggcacgtgctagaccggcacgccctcgccgcgtgctgcgctcagttctttgttggatttcttgtttgtgttcttaaaaaaataaaaaaaactgatttccacggggtccgtttttgggtcttgctgcgccgcctgggggaggggaagccagacggagcgtgctgtggcggcgcccgggcggcgtctccttggagaaaggcgcattgtgcgggggtcgggctcgggggcaggagacccggcgctgcttccccctgcttgtttattcagccgagaacagatggctccttatgcaggctgcgggaagggagggggctcaacaggaatccttggggtctgagtaagtctgcgccactccattccccagcggactgaacgcttcgctcccggccacgcctatcccatgatgcccccaaatctggctcaaaagctgctagtactgagcgctggtaaggggtgcgggggtggcgttggtgggaaagtgagaggcagtaattgaacccctaaatggatggggtgggagtggatagatgagctttgaccgattttaactctctcctgcactaggtaggaagagaaggaggtatcagctaggacccctgtctgtccagcctgtggccttccttctgtcatcttatcaacccctcccaaaacacctctatcagcaaagaacacaaaccagtaccatttcccgagtgcatgtaagaaacaacgaagtttaaaatgcttccagtcctagagtgatttggggaaaattattttgtgtttgtttcctcatctgcaaagtggagactggaattgttacccccaagcgtgatggggagaatcaaggacattcttctaaggcatgtgccttgtacctatccctcaattaatggtagctattaactgttcttatagtaacagctaacatatttagtgttgggcattattgtaactgatttgcaggtattttcattttatacttggaaccagtgaaataagaattattgcctttatcatccccattttacagatgaggacactgagacacagaaaggttaagtttccaacagtaacataaccagtacgaagctgaaccaggatgtttcctatggctgctctaataagttaccacaaattgagtggctagcaacacacatttattaccttacagtttttaggtcagaagtctaagatgtgttggcaaggctttattccttctagaggcttttgtttcctggccttttccagcttctagaggctacctgaattccttgggtcatggccctacatcacttcagactcagtttccatcagcacatctctttctctgactctgaccttcccgtctctgtcttataaggacccttctgtttatattggcatgaccttgataatcaaagataatcccatctcaagctatctttttttttttttttttgagatggagtttttgctcttgttgcccaggctggagtgcaatggcgcgatctcggctcactgcaacctccgcctcctgggttcaagcgattctcctgcctcagcctcctgagtagctgggattacaggtgtatgccaccactcccagctaattttttgtatttttagtagaaacagagtttctccatgttggtcaggctggacttgaacttccgacctcaggtgatccgcctgcctcagcctcccaaagtgttgggattacaggcgtgagccaccgcgcccagcctcaagctctctatcttaaccacatctgcaaagtcccttttgtcgtgtgaggtgaaatcacaggtgccggggattaaaatgtgtacatctttgtggggaaggccattctgcctaccacatggggcttgaagccaggctgactgacttcagagcagctgctcttaagtactctgtgccgggcaccttgctaggcttggtgaagagggagaaactgatgattgagaaaaactcttgagctgaggaagctccgggctagaagggctgaggtccacctgactgttgcagaaagagggaacttcagatgagaggagggagaaatcctggagaggtgatccttaaacggtggctggaatttccgcaggaggccatggaagactttacaggtgagtgaagcttgaactatgcgtggtcaggagggactggagtatggggggatgggaatgatcatcttacctggccatgaggatcagatgagctaaagacctatggacttggcatgtgacctcaccttgccttaccattcattttacagttggggaaactgaggcctagaggccagagttgcctgcccaaggtcacacagagagaaaacatcagttgcaccaggaagaagcctagtggggaggtcaaactggagcagggtagtcaactgatagggggcactgagggcaaaggccaggctccttccttcctcttccctggagttggcaggcactggcttctctggggtttcttttctcatgcttttttctcttgcaatctccctaatggccactggatggcgccgggagcactgatttggagctgggtcctagagccttcgcaggccgttggcatctggcacttgggctgcagagcctgtcctcccttaattccccgactctggcagccccaccaccgaagtctacaagctgcttctgttcccatgcagtggccccatagtcctggatttgaagaccagccctgctacttaccaggtgtgtgttggtgttgacaggtactggttccctttctcacttcttgattcctttctctcatttccctttcctcctaccagcttaaccctgctggatacagggaattcctgttccctaaccatgccccacataaggtcagctagcgcttgcttctttgtttatacccccatcttacgttatgggatagaagacttacaaaggacccgtgaattcaggaaaacaaacatccattaactcaagaacagaaagtgagaacccaagtaacagtgtgaggagagtaacactgccaagaaagcttagatggagaaggcaccgagcccgaacaaagacccccgggcccgggtcttttggtacccaggcaagcacgggtttatgtggctttcagagcctgttaagatcaggaataaagcacgtagatattgggggagtcctgagcccaggtgtgtggagagaactcagcgccctcagccttcttggttccctggagagtttgaatcattaaaaaacgacaatatcttccctagtggttagcagagatgccacttctggagctgtttcttagacttagtaacatgaactaggcatggccttgggtgggaaagggcagggcaggaagggcctgtaacttcagccaagtgctggactcgctttctgaatttcacctctgtgttgtctggctctgtttctccgtggtttttggcctttctcttcttctattctagctcacagctctctccatttctgcagccggcacagctgctgtctctaaggactgtctactcttctggttctttggacctaggatagtgaaacaggagagaaaactatcaattaccaaacactggcctgcatgctgggggccaggctgtgcctttcatctgtgttgtctcgttgaaacctctcaacctacaggagggaaaactgaacttgaaagaggccagttagttgcccaaggcccagagcttccaagttagggtttgaacccaggtggtcttgatcccagagtaggcccatttcacatttctacccttcagttattagggacaaatttggactttttcaaagaaacctttttcaggaagtttatggagtagaccaaagcaaagcccgagatacagtgcaggtgaatggcaggagccgctctgccgtttgtcagcagcacagcctccatgggacacttttgcctcagtgtcccctcttgtaaaacctgtgagcaggccaggcatggtggctcacacctgtaatgccaagcactttgggaggttgaggcgggcggatcacaaggtcaggagttcaagaccagcctgaccaacatggtgaagccccgtctctactaaaaatacaaaaattagccgggtatggtggcatgtgcctgtaatcccagctactcaggaggctgaagcaggagaatcgcttgaacccaggaggcagagtttcagtgagccaagatcgcgccactgcactccagcctgggcgacagagggagactccgtctcaaaaacaaacaaaaccaagaaacaaaacaataacaacaacaaaaaaaacctgtgggcaacgccaacctcataggttaaaaggaaagagcgaagtcattgatgaatgtgaacatgcacagtggatgatcaggaagggcccctttctctgcaggccattacttgccctttttccacaccctcccactcatttgaagtggcgtggcttcagatccccaggcccaatgaagaagttcggccacatcacacaatgaaaagcaaattgctgttaaatacacagaggagggcataagcagctcagctttatggagcccaggaaggcttcctggaggaggtggcaagtgagctgcaccagcaaggaagggtagacattccgcagatgataaaggaggagagggctcctgggcacaggactcgagtggcttttcaagggcatgtggggagggtgaggctggagaagacagtcgccctcagtcccccaggtggatcatgctgcatcccatgacaagggcttgtgggttagtggttctaacccacaagacttcatggacttatgaatcacctgagggtctgttaaaatgcagcatcctgcagtggggcccaggaatctttgtttctcccagctcctgggtgacactgcacaagtgatcagaggaagaaaggagacacaaagcttctggtgatggacatgagtgctgggcaagggctcagtgtcctccaccaggcaggggagcagactagggtctcaggatcttgggtgtgggcgtgtactagaccttgcgccccacatgagcggacgtgaggagctaagctgagaaacagcaaatgggaaagcaaatgtgaatgccagggcaagcattacaagtttgttaggagtcaccaggggctgggcagagaaggcaggttcagtcacaagggttttagtccagagacatgtgctggagaggagagggaaggctggaaggggaggtatgaggagcaactgctgggaagcaatttttttgttgcgggaggtgagtggcagccctggggctttggaaaaggtgataaaaaagaacatatactaagggcctgaaattctaaggacttatgaagaacccatttaattcccataaccatcttaattagaaaaatatattgttattcttaatttacagacaaagaaacccagtcccagaaagtaatttgcacagcaaataagccgtggagcagagacttaagtccagactgtgtcagtccagagctgggcactgattcttcattctagggtatcccaagctcatttaaaactcccggatccatgagccactgtttctttctgttcttcctcctgccatggacaatcccatctccagcccacctcatcccttgctctgctctttcccaggtccaagatggttctttttcctgaagcggtgaatggaactgctgctgtttatccctctctaggcagccagggcatgcgtgttcttcccagcagctgagatgaggatggaaattaatagaggatatagacagaaaaaagctaacaactaactacactatgcagataataattgaggtgtattttctcccagatgaacaagataatctgagtgacccctgttccctattacaggactccaattcctaatcttggcagttgccccccaaaataccctcccagtaaatgtttcttgaatacctgctttgggaatatgttaggtactgtgctgaacactggggattcagtggtgaaaaagagagtcctacactgtctttaagaaacttgtgttctaggagagggcagacaacaagtcagtaaatgaataaggtttcaactagtgatcattgctgggaagatgatgaaattgagtaagggtagagagctgcgctgtccacaggatttccgtgatggtggaaaggttctatatccttgctgtccaacatagcagtcaatgtgactaatgtgaccaagaaactgaattttaagttctgttttagataatttaaatttaaatagccccatgtgatttgtggccactgcgtcactcatcacaggtatagaggacacctggaaaggggagaggtgattaagtgaggtggtcaagggagactccctgagggggcgaaatttgaactgaggtctgagagggaggcagccttccattgttccagggggagagagtgcagatgtgggggccttctgggataaacaaagcttgaagttctggggcggagagaaggcttgtgagctggcattcactgggtgaggtagtgtggtgggagctgatggtggaggggtggtgggtaccggataactggggcatggcaggctgcggcgaggtgggcacccctcattccccttagcaacacagcaggtatagctgccctgcccttgcctgcccccttctctctcagggctgtggggaggactagatgagaccaggtaacgtgcacatgctctgtaagttgtacagagctgccaggcgatggctcatgcctgttaatcccagcactttgggaggccgaggcagatggatcacctgaggtcaggagttcaagaccagcctgaccaatgtggtgaaatctcatctctactaaaaataaaaaattagctgggcatggtggcgggtgcctgtaatcccagctactcgggaggctgagacaggagaatcgcttgaacccgggaggtagaggttgcggtgagccgagattacgccattgcactcgagcctgggcaacaagagcgaaacttcatctaaaaaaaaaaaaaaaaaaaaaaaaaaagttgtacagtgctgcccataagggtagagctgtggttctgagtgtgatcttggaccagcagcatgagcatcatctgggaacacgttagaaatgaacattcttgggccacaccctggatctactagtttaaagctctgggtgtggggcccagcaacgtttccaaaagccctccgggtggctgtgatgcaggctcaagtttaagagcaactgcagaagactggcggcaatcacctcctcctcctccttctcatctcaggcccccaacaaattgtccttccaactccaaccctggcagaattccttggtggctcattgcgcgccctagccctccttccctcagagctagctcagcttttggcttcacatacacagactaaaacaaacaaacaaaaatcagatagataaaacctttgtattaaaaatattttcaccatacaagccgtccagggtcgtcattaaaataaaacttaggccagacacagtggctcatgcctacaatcctagcagtttgggaggccaaggtgggcagatggcttgagctcaggagtttgagaccagcctggccaacatgaagaaacctcatctctgctaaaaatacaaatattaggtggtcatggtggcatgcacctgtagtcccagctacttgggaggctgaggtgggaggatagcttgagcctgggaggcggaggttgcagcgagctgagattgcaccactgtactctcgcctgggcgacagagtgagactgtctcaaaaaataaataaacaaaacgtctatagcatagaaccgatcaagtgaaaaaagatcccctgcttccgttaatcctattccctagagattaccacagaatgatttcttgtgattccttctagacgtctcctatgcctgtagaggcagctagtgtagtgctccaaaaccagtttgtttggtttaaaatcccaggtttgcttatttgtcaaataaattggacaagttgtctcagtgttgtcattcagaaaatgaagttaataatagcaccaacctcatagaattgttgtgaggattaaataaattcaaataaagcaatcaggagacaatccacttaacattcttacaacagtgcctggtatatagtatgtacaaacatgagtgtttgttaataaataaaatgcatggctgaggtttaattattctatgccttttccttggggatatagtcttgagagaataagccaaaggtgcaggaacagttggaaagccatttacgatggggatgatattgagagccactgaaaaaatcctgaccagatgattcttgccggtgacctcggctgacttccttggtttctgatcattatttcttattttattttattttattttttatttttttttgagatggagtcttgctctgttgctcggctggagtgcagggacgtgatcttggctcactgcaacctccaccttccaggtccaagcgattctcctgcctcagccttccgagcagctggaactacaggcacacgccaacacactcggctaatttttgtatttttagtagagacggggtttcaccatgttggccaggatggtctcgatctcttgaccttgtgatccgcctgcctcggcctcccaaagtgctgggattacagccataagccaccatgcccagcctctaatcattatttctataaactccctggtatctttgcaaagcttctaagtttcacagtttcaaaaaacatagcaggaggggggtatttacatagaacccagtgtggatggtacaccctggacttgtgaaatggtctgtctgatatcagccaggtgtggcatgtctgttgcttgcaaccaagaactctgaccatgccttcctccattctttctaagggctgtgtagtattctactctatgtatgtgttgtatttcacttaaccatttcttattgatggatgtctggatagtttagctattctacactacacagacaaatgcaatgacaagcttcccagagcctattgtccagcccccacctgtaccctattccccccgctttttttttggagacagggtcttgctctgtcatccaggctggagtgcagtggcacaatcacagttcactgaaggcttgctctcgcaggctcaagtgatcttcccaccttagccttctgagtagctaggactacaggtgcatgccaccacaactagctatttttttcattttttgtagagatgagatctcactatgttgtccaggctggtctgaaactcctgggcgcaagtgatcctcccacctcagcctcccaaagctctggtattataggcatgagtgactgcatccggcctgaaatgggctctttatcttacatgatcctgtgtagtgctcatgccaacactgtgaagtttgcatcaacactttccctctacagatgaggcagctgaggtcagagagaggatgagatatgcccccaaaccatcagtgagccccttgatgagcagggctcttgccacttcatcagggtggtcagtcggggggagaatgtttgggatgaaagcgggggccttcccttgactcaataccagctggcaaaaggcagaggttcttggaggagagaggtaagtcagggaaggactcgtgggagtgctggggagccttccactgtcaactcagctgctttccagagggcaagaggagagagagggtggaggacagttggcatgtggattgaggaacaataatgatgatgatgctaataatcacagtgactaatgttttgggcgagtcacaaagcaatttcctattatgaatagttcagcagagccacacaaccatccccttggaggaagacaaggcaatgtggctactcccattttgcagaagggaaaattcaggactggagagggagagtaacttgcccaagtttacatgtcaagataatcgccatgctgggtggggccagacctttcaggtcccagcccaggatctagctccctcccatgggccacagctgtggctggcagagaggtgcggcttttgtcagggctgaagctcagccacaccctctctccagcctcaagttgggtgccaggcagagggtttggactgaaggctggggatgtcaaaggacagaggggtctggtttgagtgggggccaccccccaagtcatccacatgtcctccag

SEQ ID NO: 154 - DNA, 1854 bp, Homo sapiens
gctctgacacctccattctctgtccccaagcgccatgagaggccttctttgctggcccgtgttgctgctccttcttcagccctgggaaacccagctccagttgacaggtcccaggtgtcacactgggcccctggatctggtgttcgtgattgacagctcccgcagcgtgcgccctttcgagttcgagaccatgcggcagttcctcatgggcctcctccgaggcctgaacgtgggtcccaacgccacgcgcgttggcgtgatccagtattcgagtcaagtgcagagcgtcttccctctccgcgcgttctctcgccgcgaggacatggagcgcgccatccgcgacctggtgcctctggcgcaaggcaccatgacgggactggcaatccagtacgccatgaacgtggccttcagtgtggccgagggcgcgcgaccgccagaggagcgcgtgccgcgtgtcgctgtcatcgtgacagacgggcggccccaggaccgcgtggccgaggtggcggcacaggcgcgcgcccgcggcattgaaatttacgcggtgggggtgcagcgcgcggacgtgggctccctgcgcgccatggcatcgcccccgctagacgagcacgtcttcctcgtagagtccttcgacctcatccaggagttcggcctgcagttccagagccggctgtgtgtccgggacctttgcaatggcgtggaccatggctgtgagttccagtgtgtgagcgagggcctctcctaccgctgcctgtgccccgaggggcggcaacttcaggcagatggcaagagctgcaaccggtgccgggaaggccacgtggaccttgttctgctggttgatggctccaagagcgtgcgtccacaaaacttcgagctagtgaagcgcttcgtgaaccagattgtggacttcctagatgtgtcccccgagggcacgcgggtggggctggtgcagttctcgagccgcgtgcgcaccgagttccctctgggtcgctacggcaccgcagccgaggtgaagcaggcggtcctggccgtggagtacatggaacgcggcaccatgacagggctggcgttgcggcacatggtggagcacagcttctccgaggcgcagggtgcacggccccgtgcccttaacgtgcctcgtgttggcctggtcttcacggatggccgctcccaggatgacatctcggtgtgggcagcgcgcgccaaggaggaaggcatcgtcatgtacgccgtgggcgtgggcaaggcggtggaggcggagctgcgcgagatcgcctcggagccagcggaactgcacgtgtcctatgccccggacttcggcaccatgacgcacctgctggagaacctcagaggcagcatctgtccagaggagggcatcagcgcagggacagagcttcggagcccatgcgaatgcgaaagcctcgtggagttccagggccgcacgctgggggcgctcgagagcctgacgctgaacctggcccagctgacggcgcgcctggaggatctggagaaccagctggccaaccagaagtgagggccacggacggcccagacccgggctggggcgcggcaccacggacggtgccccttgcgcgccatcggtgcgccggggccaggcagaacctgggcccgtccggcttgggctgtcggggcggaggcgctggcgggcttccggcattgagctgagttggcctcgcccggaccattaggcggactgcggcgtcagggggatagcgggtggtgagggaaggggcacgtgctagaccggcacgccctcgccgcgtgctgcgctcagttctttgttggatttcttgtttgtgttcttaaaaaaataaaaaaaactgatttccacgg

SEQ ID NO: 155 - protein, 493 aa, Homo sapiens
MRGLLCWPVLLLLLQPWETQLQLTGPRCHTGPLDLVFVIDSSRSVRPFEFETMRQFLMGLLRQVGPNATRVGVIQYSSQVQSVFPLRAFSRREDMERAIRDLVPLAQGTMTGLAIQYAMNVAFSVAEGARPPEERVPRVAVIVTDGRPQDRVAEVAAQARRIEIYAVGVQRADVGSLRAMDPLDEHVFLVESFDLIQEFGLQFQSRLCVRDLCNGVDHGCEFQCVSEGLSYRCLCPEGRQLQADGKSCNRCREGHVDLVLLVDGSKSVRPQNFELVKRFVNQIVDFLDVSPEGTRVGLVQFSSRVRTEFPLGRYGTAAEVKQAVLAVEYMERGTMTGLALRHMVEHSFSEAQGARPRALNVPRVGLVFTDGRSQDDISVWAARAKEEGIVMYAVGVGKAVEAELREIASEPAELHVSYAPDFGTMTHLLENLRGSICPEEGISAGTELRSPCECESLVEFQGRTLGALESLTLNLAQLTARLEDLENQLANQK

SEQ ID NO: 156 - DNA, 2334 bp, Homo sapiens
gagtgtggctgccccggtctccccagtctcccgctgtagctgacttccagcctggcccgcagctagccctgtctgcagctccaagcgtggtaggagcagggggtgctgggtttgccccccctcaggaggaaggggggatccctccctgccagtgggaggggttgcagcctgcacttccccctccccacccgccagccctgggttaaatgcggccgttgcctctgtgtgctccagctgcctggcagtccccacctagggcacgctgccacgccgccgttacctggtccaagtgcccgggaggctccgcctgtcggcttcgctctgcagctgcatctctgatctgtcctgcaggctcaggctctgacacctccattctctgtccccaagcgccatgagaggccttctttgctggcccgtgttgctgctccttcttcagccctgggaaacccagctccagttgacaggtcccaggtgtcacactgggcccctggatctggtgttcgtgattgacagctcccgcagcgtgcgccctttcgagttcgagaccatgcggcagttcctcatgggcctcctccgaggcctgaacgtgggtcccaacgccacgcgcgttggcgtgatccagtattcgagtcaagtgcagagcgtcttccctctccgcgcgttctctcgccgcgaggacatggagcgcgccatccgcgacctggtgcctctggcgcaaggcaccatgacgggactggcaatccagtacgccatgaacgtggccttcagtgtggccgagggcgcgcgaccgccagaggagcgcgtgccgcgtgtcgctgtcatcgtgacagacgggcggccccaggaccgcgtggccgaggtggcggcacaggcgcgcgcccgcggcattgaaatttacgcggtgggggtgcagcgcgcggacgtgggctccctgcgcgccatggcatcgcccccgctagacgagcacgtcttcctcgtagagtccttcgacctcatccaggagttcggcctgcagttccagagccggctgtgtgccattgactactgcagctttgggaaccatagctgtcagcatgagtgtgttagcacccctggtgggccacggtgccactgcagagagggccatgacttgcagcctgatgggaggagctgtcaggtccgggacctttgcaatggcgtggaccatggctgtgagttccagtgtgtgagcgagggcctctcctaccgctgcctgtgccccgaggggcggcaacttcaggcagatggcaagagctgcaaccggtgccgggaaggccacgtggaccttgttctgctggttgatggctccaagagcgtgcgtccacaaaacttcgagctagtgaagcgcttcgtgaaccagattgtggacttcctagatgtgtcccccgagggcacgcgggtggggctggtgcagttctcgagccgcgtgcgcaccgagttccctctgggtcgctacggcaccgcagccgaggtgaagcaggcggtcctggccgtggagtacatggaacgcggcaccatgacagggctggcgttgcggcacatggtggagcacagcttctccgaggcgcagggtgcacggccccgtgcccttaacgtgcctcgtgttggcctggtcttcacggatggccgctcccaggatgacatctcggtgtgggcagcgcgcgccaaggaggaaggcatcgtcatgtacgccgtgggcgtgggcaaggcggtggaggcggagctgcgcgagatcgcctcggagccagcggaactgcacgtgtcctatgccccggacttcggcaccatgacgcacctgctggagaacctcagaggcagcatctgtccagaggagggcatcagcgcagggacagagcttcggagcccatgcgaatgcgaaagcctcgtggagttccagggccgcacgctgggggcgctcgagagcctgacgctgaacctggcccagctgacggcgcgcctggaggatctggagaaccagctggccaaccagaagtgagggccacggacggcccagacccgggctggggcgcggcaccacggacggtgccccttgcgcgccatcggtgcgccggggccaggcagaacctgggcccgtccggcttgggctgtcggggcggaggcgctggcgggcttccggcattgagctgagttggcctcgcccggaccattaggcggactgcggcgtcagggggatagcgggtggtgagggaaggggcacgtgctagaccggcacgccctcgccgcgtgctgcgctcagttctttgttggatttcttgtttgtgttcttaaaaaaataaaaaaaactgatttccacgg

SEQ ID NO: 157 - protein, 534 aa, Homo sapiens
MRGLLCWPVLLLLLQPWETQLQLTGPRCHTGPLDLVFVIDSSRSVRPFEFETMRQFLMGLLRQVGPNATRVGVIQYSSQVQSVFPLRAFSRREDMERAIRDLVPLAQGTMTGLAIQYAMNVAFSVAEGARPPEERVPRVAVIVTDGRPQDRVAEVAAQARRIEIYAVGVQRADVGSLRAMDPLDEHVFLVESFDLIQEFGLQFQSRLCAIDYCSFGNHSCQHECVSTPGGPRCHCREGHDLQPDGRSCQVRDLCNGVDHGCEFQCVSEGLSYRCLCPEGRQLQADGKSCNRCREGHVDLVLLVDGSKSVRPQNFELVKRFVNQIVDFLDVSPEGTRVGLVQFSSRVRTEFPLGRYGTAAEVKQAVLAVEYMERGTMTGLALRHMVEHSFSEAQGARPRALNVPRVGLVFTDGRSQDDISVWAARAKEEGIVMYAVGVGKAVEAELREIASEPAELHVSYAPDFGTMTHLLENLRGSICPEEGISAGTELRSPCECESLVEFQGRTLGALESLTLNLAQLTARLEDLENQLANQK

SEQ ID NO: 158 - DNA, 1496 bp, Homo sapiens
atgagaggccttctttgctggcccgtgttgctgctccttcttcagccctgggaaacccagctccagttgacagccattgatctgtgtgctgaagggacccatggatgtgagcaccactgcgtcaattccccaggctcctatttctgtcactgccaagttggctttgtactccagcaggaccagaggagctgcagggccattgactactgcagctttgggaaccatagctgtcagcatgagtgtgttagcacccctggtgggccacggtgccactgcagagagggccatgacttgcagcctgatgggaggagctgtcaggtccgggacctttgcaatggcgtggaccatggctgtgagttccagtgtgtgagcgagggcctctcctaccgctgcctgtgccccgaggggcggcaacttcaggcagatggcaagagctgcaaccggtgccgggaaggccacgtggaccttgttctgctggttgatggctccaagagcgtgcgtccacaaaacttcgagctagtgaagcgcttcgtgaaccagattgtggacttcctagatgtgtcccccgagggcacgcgggtggggctggtgcagttctcgagccgcgtgcgcaccgagttccctctgggtcgctacggcaccgcagccgaggtgaagcaggcggtcctggccgtggagtacatggaacgcggcaccatgacagggctggcgttgcggcacatggtggagcacagcttctccgaggcgcagggtgcacggccccgtgcccttaacgtgcctcgtgttggcctggtcttcacggatggccgctcccaggatgacatctcggtgtgggcagcgcgcgccaaggaggaaggcatcgtcatgtacgccgtgggcgtgggcaaggcggtggaggcggagctgcgcgagatcgcctcggagccagcggaactgcacgtgtcctatgccccggacttcggcaccatgacgcacctgctggagaacctcagaggcagcatctgtccagaggagggcatcagcgcagggacagagcttcggagcccatgcgaatgcgaaagcctcgtggagttccagggccgcacgctgggggcgctcgagagcctgacgctgaacctggcccagctgacggcgcgcctggaggatctggagaaccagctggccaaccagaagtgagggccacggacggcccagacccgggctggggcgcggcaccacggacggtgccccttgcgcgccatcggtgcgccggggccaggcagaacctgggcccgtccggcttgggctgtcggggcggaggcgctggcgggcttccggcattgagctgagttggcctcgcccggaccattaggcggactgcggcgtcagggggatagcgggtggtgagggaaggggcacgtgctagaccggcacgccctcgccgcgtgctgcgctcagttctttgttggatttcttgtttgtgttcttaaaaaaataaaaaaaactgatttccacgg

SEQ ID NO: 159 - protein, 391 aa, Homo sapiens
MRGLLCWPVLLLLLQPWETQLQLTAIDLCAEGTHGCEHHCVNSPGSYFCHCQVGFVLQQDQRSCRAIDYCSFGNHSCQHECVSTPGGPRCHCREGHDLQPDGRSCQVRDLCNGVDHGCEFQCVSEGLSYRCLCPEGRQLQADGKSCNRCREGHVDLVLLVDGSKSVRPQNFELVKRFVNQIVDFLDVSPEGTRVGLVQFSSRVRTEFPLGRYGTAAEVKQAVLAVEYMERGTMTGLALRHMVEHSFSEAQGARPRALNVPRVGLVFTDGRSQDDISVWAARAKEEGIVMYAVGVGKAVEAELREIASEPAELHVSYAPDFGTMTHLLENLRGSICPEEGISAGTELRSPCECESLVEFQGRTLGALESLTLNLAQLTARLEDLENQLANQK

SEQ ID NO: 160 - DNA, 1977 bp, Homo sapiens
gctctgacacctccattctctgtccccaagcgccatgagaggccttctttgctggcccgtgttgctgctccttcttcagccctgggaaacccagctccagttgacaggtcccaggtgtcacactgggcccctggatctggtgttcgtgattgacagctcccgcagcgtgcgccctttcgagttcgagaccatgcggcagttcctcatgggcctcctccgaggcctgaacgtgggtcccaacgccacgcgcgttggcgtgatccagtattcgagtcaagtgcagagcgtcttccctctccgcgcgttctctcgccgcgaggacatggagcgcgccatccgcgacctggtgcctctggcgcaaggcaccatgacgggactggcaatccagtacgccatgaacgtggccttcagtgtggccgagggcgcgcgaccgccagaggagcgcgtgccgcgtgtcgctgtcatcgtgacagacgggcggccccaggaccgcgtggccgaggtggcggcacaggcgcgcgcccgcggcattgaaatttacgcggtgggggtgcagcgcgcggacgtgggctccctgcgcgccatggcatcgcccccgctagacgagcacgtcttcctcgtagagtccttcgacctcatccaggagttcggcctgcagttccagagccggctgtgtgccattgactactgcagctttgggaaccatagctgtcagcatgagtgtgttagcacccctggtgggccacggtgccactgcagagagggccatgacttgcagcctgatgggaggagctgtcaggtccgggacctttgcaatggcgtggaccatggctgtgagttccagtgtgtgagcgagggcctctcctaccgctgcctgtgccccgaggggcggcaacttcaggcagatggcaagagctgcaaccggtgccgggaaggccacgtggaccttgttctgctggttgatggctccaagagcgtgcgtccacaaaacttcgagctagtgaagcgcttcgtgaaccagattgtggacttcctagatgtgtcccccgagggcacgcgggtggggctggtgcagttctcgagccgcgtgcgcaccgagttccctctgggtcgctacggcaccgcagccgaggtgaagcaggcggtcctggccgtggagtacatggaacgcggcaccatgacagggctggcgttgcggcacatggtggagcacagcttctccgaggcgcagggtgcacggccccgtgcccttaacgtgcctcgtgttggcctggtcttcacggatggccgctcccaggatgacatctcggtgtgggcagcgcgcgccaaggaggaaggcatcgtcatgtacgccgtgggcgtgggcaaggcggtggaggcggagctgcgcgagatcgcctcggagccagcggaactgcacgtgtcctatgccccggacttcggcaccatgacgcacctgctggagaacctcagaggcagcatctgtccagaggagggcatcagcgcagggacagagcttcggagcccatgcgaatgcgaaagcctcgtggagttccagggccgcacgctgggggcgctcgagagcctgacgctgaacctggcccagctgacggcgcgcctggaggatctggagaaccagctggccaaccagaagtgagggccacggacggcccagacccgggctggggcgcggcaccacggacggtgccccttgcgcgccatcggtgcgccggggccaggcagaacctgggcccgtccggcttgggctgtcggggcggaggcgctggcgggcttccggcattgagctgagttggcctcgcccggaccattaggcggactgcggcgtcagggggatagcgggtggtgagggaaggggcacgtgctagaccggcacgccctcgccgcgtgctgcgctcagttctttgttggatttcttgtttgtgttcttaaaaaaataaaaaaaactgatttccacgg

SEQ ID NO: 161 - protein, 534 aa, Homo sapiens; identical to SEQ ID NO: 157

SEQ ID NO: 162 - DNA, 2211 bp, Homo sapiens
gagtgtggctgccccggtctccccagtctcccgctgtagctgacttccagcctggcccgcagctagccctgtctgcagctccaagcgtggtaggagcagggggtgctgggtttgccccccctcaggaggaaggggggatccctccctgccagtgggaggggttgcagcctgcacttccccctccccacccgccagccctgggttaaatgcggccgttgcctctgtgtgctccagctgcctggcagtccccacctagggcacgctgccacgccgccgttacctggtccaagtgcccgggaggctccgcctgtcggcttcgctctgcagctgcatctctgatctgtcctgcaggctcaggctctgacacctccattctctgtccccaagcgccatgagaggccttctttgctggcccgtgttgctgctccttcttcagccctgggaaacccagctccagttgacaggtcccaggtgtcacactgggcccctggatctggtgttcgtgattgacagctcccgcagcgtgcgccctttcgagttcgagaccatgcggcagttcctcatgggcctcctccgaggcctgaacgtgggtcccaacgccacgcgcgttggcgtgatccagtattcgagtcaagtgcagagcgtcttccctctccgcgcgttctctcgccgcgaggacatggagcgcgccatccgcgacctggtgcctctggcgcaaggcaccatgacgggactggcaatccagtacgccatgaacgtggccttcagtgtggccgagggcgcgcgaccgccagaggagcgcgtgccgcgtgtcgctgtcatcgtgacagacgggcggccccaggaccgcgtggccgaggtggcggcacaggcgcgcgcccgcggcattgaaatttacgcggtgggggtgcagcgcgcggacgtgggctccctgcgcgccatggcatcgcccccgctagacgagcacgtcttcctcgtagagtccttcgacctcatccaggagttcggcctgcagttccagagccggctgtgtgtccgggacctttgcaatggcgtggaccatggctgtgagttccagtgtgtgagcgagggcctctcctaccgctgcctgtgccccgaggggcggcaacttcaggcagatggcaagagctgcaaccggtgccgggaaggccacgtggaccttgttctgctggttgatggctccaagagcgtgcgtccacaaaacttcgagctagtgaagcgcttcgtgaaccagattgtggacttcctagatgtgtcccccgagggcacgcgggtggggctggtgcagttctcgagccgcgtgcgcaccgagttccctctgggtcgctacggcaccgcagccgaggtgaagcaggcggtcctggccgtggagtacatggaacgcggcaccatgacagggctggcgttgcggcacatggtggagcacagcttctccgaggcgcagggtgcacggccccgtgcccttaacgtgcctcgtgttggcctggtcttcacggatggccgctcccaggatgacatctcggtgtgggcagcgcgcgccaaggaggaaggcatcgtcatgtacgccgtgggcgtgggcaaggcggtggaggcggagctgcgcgagatcgcctcggagccagcggaactgcacgtgtcctatgccccggacttcggcaccatgacgcacctgctggagaacctcagaggcagcatctgtccagaggagggcatcagcgcagggacagagcttcggagcccatgcgaatgcgaaagcctcgtggagttccagggccgcacgctgggggcgctcgagagcctgacgctgaacctggcccagctgacggcgcgcctggaggatctggagaaccagctggccaaccagaagtgagggccacggacggcccagacccgggctggggcgcggcaccacggacggtgccccttgcgcgccatcggtgcgccggggccaggcagaacctgggcccgtccggcttgggctgtcggggcggaggcgctggcgggcttccggcattgagctgagttggcctcgcccggaccattaggcggactgcggcgtcagggggatagcgggtggtgagggaaggggcacgtgctagaccggcacgccctcgccgcgtgctgcgctcagttctttgttggatttcttgtttgtgttcttaaaaaaataaaaaaaactgatttccacgg

SEQ ID NO: 163 - protein, 493 aa, Homo sapiens; identical to SEQ ID NO: 155

SEQ ID NO: 164 - DNA, 2457 bp, Homo sapiens
gagtgtggctgccccggtctccccagtctcccgctgtagctgacttccagcctggcccgcagctagccctgtctgcagctccaagcgtggtaggagcagggggtgctgggtttgccccccctcaggaggaaggggggatccctccctgccagtgggaggggttgcagcctgcacttccccctccccacccgccagccctgggttaaatgcggccgttgcctctgtgtgctccagctgcctggcagtccccacctagggcacgctgccacgccgccgttacctggtccaagtgcccgggaggctccgcctgtcggcttcgctctgcagctgcatctctgatctgtcctgcaggctcaggctctgacacctccattctctgtccccaagcgccatgagaggccttctttgctggcccgtgttgctgctccttcttcagccctgggaaacccagctccagttgacaggtcccaggtgtcacactgggcccctggatctggtgttcgtgattgacagctcccgcagcgtgcgccctttcgagttcgagaccatgcggcagttcctcatgggcctcctccgaggcctgaacgtgggtcccaacgccacgcgcgttggcgtgatccagtattcgagtcaagtgcagagcgtcttccctctccgcgcgttctctcgccgcgaggacatggagcgcgccatccgcgacctggtgcctctggcgcaaggcaccatgacgggactggcaatccagtacgccatgaacgtggccttcagtgtggccgagggcgcgcgaccgccagaggagcgcgtgccgcgtgtcgctgtcatcgtgacagacgggcggccccaggaccgcgtggccgaggtggcggcacaggcgcgcgcccgcggcattgaaatttacgcggtgggggtgcagcgcgcggacgtgggctccctgcgcgccatggcatcgcccccgctagacgagcacgtcttcctcgtagagtccttcgacctcatccaggagttcggcctgcagttccagagccggctgtgtgccattgatctgtgtgctgaagggacccatggatgtgagcaccactgcgtcaattccccaggctcctatttctgtcactgccaagttggctttgtactccagcaggaccagaggagctgcagggccattgactactgcagctttgggaaccatagctgtcagcatgagtgtgttagcacccctggtgggccacggtgccactgcagagagggccatgacttgcagcctgatgggaggagctgtcaggtccgggacctttgcaatggcgtggaccatggctgtgagttccagtgtgtgagcgagggcctctcctaccgctgcctgtgccccgaggggcggcaacttcaggcagatggcaagagctgcaaccggtgccgggaaggccacgtggaccttgttctgctggttgatggctccaagagcgtgcgtccacaaaacttcgagctagtgaagcgcttcgtgaaccagattgtggacttcctagatgtgtcccccgagggcacgcgggtggggctggtgcagttctcgagccgcgtgcgcaccgagttccctctgggtcgctacggcaccgcagccgaggtgaagcaggcggtcctggccgtggagtacatggaacgcggcaccatgacagggctggcgttgcggcacatggtggagcacagcttctccgaggcgcagggtgcacggccccgtgcccttaacgtgcctcgtgttggcctggtcttcacggatggccgctcccaggatgacatctcggtgtgggcagcgcgcgccaaggaggaaggcatcgtcatgtacgccgtgggcgtgggcaaggcggtggaggcggagctgcgcgagatcgcctcggagccagcggaactgcacgtgtcctatgccccggacttcggcaccatgacgcacctgctggagaacctcagaggcagcatctgtccagaggagggcatcagcgcagggacagagcttcggagcccatgcgaatgcgaaagcctcgtggagttccagggccgcacgctgggggcgctcgagagcctgacgctgaacctggcccagctgacggcgcgcctggaggatctggagaaccagctggccaaccagaagtgagggccacggacggcccagacccgggctggggcgcggcaccacggacggtgccccttgcgcgccatcggtgcgccggggccaggcagaacctgggcccgtccggcttgggctgtcggggcggaggcgctggcgggcttccggcattgagctgagttggcctcgcccggaccattaggcggactgcggcgtcagggggatagcgggtggtgagggaaggggcacgtgctagaccggcacgccctcgccgcgtgctgcgctcagttctttgttggatttcttgtttgtgttcttaaaaaaataaaaaaaactgatttccacgg

SEQ ID NO: 165 - protein, 575 aa, Homo sapiens
MRGLLCWPVLLLLLQPWETQLQLTGPRCHTGPLDLVFVIDSSRSVRPFEFETMRQFLMGLLRQVGPNATRVGVIQYSSQVQSVFPLRAFSRREDMERAIRDLVPLAQGTMTGLAIQYAMNVAFSVAEGARPPEERVPRVAVIVTDGRPQDRVAEVAAQARRIEIYAVGVQRADVGSLRAMDPLDEHVFLVESFDLIQEFGLQFQSRLCAIDLCAEGTHGCEHHCVNSPGSYFCHCQVGFVLQQDQRSCRAIDYCSFGNHSCQHECVSTPGGPRCHCREGHDLQPDGRSCQVRDLCNGVDHGCEFQCVSEGLSYRCLCPEGRQLQADGKSCNRCREGHVDLVLLVDGSKSVRPQNFELVKRFVNQIVDFLDVSPEGTRVGLVQFSSRVRTEFPLGRYGTAAEVKQAVLAVEYMERGTMTGLALRHMVEHSFSEAQGARPRALNVPRVGLVFTDGRSQDDISVWAARAKEEGIVMYAVGVGKAVEAELREIASEPAELHVSYAPDFGTMTHLLENLRGSICPEEGISAGTELRSPCECESLVEFQGRTLGALESLTLNLAQLTARLEDLENQLANQK

SEQ ID NO: 166 - DNA, 2100 bp, Homo sapiens
gctctgacacctccattctctgtccccaagcgccatgagaggccttctttgctggcccgtgttgctgctccttcttcagccctgggaaacccagctccagttgacaggtcccaggtgtcacactgggcccctggatctggtgttcgtgattgacagctcccgcagcgtgcgccctttcgagttcgagaccatgcggcagttcctcatgggcctcctccgaggcctgaacgtgggtcccaacgccacgcgcgttggcgtgatccagtattcgagtcaagtgcagagcgtcttccctctccgcgcgttctctcgccgcgaggacatggagcgcgccatccgcgacctggtgcctctggcgcaaggcaccatgacgggactggcaatccagtacgccatgaacgtggccttcagtgtggccgagggcgcgcgaccgccagaggagcgcgtgccgcgtgtcgctgtcatcgtgacagacgggcggccccaggaccgcgtggccgaggtggcggcacaggcgcgcgcccgcggcattgaaatttacgcggtgggggtgcagcgcgcggacgtgggctccctgcgcgccatggcatcgcccccgctagacgagcacgtcttcctcgtagagtccttcgacctcatccaggagttcggcctgcagttccagagccggctgtgtgccattgatctgtgtgctgaagggacccatggatgtgagcaccactgcgtcaattccccaggctcctatttctgtcactgccaagttggctttgtactccagcaggaccagaggagctgcagggccattgactactgcagctttgggaaccatagctgtcagcatgagtgtgttagcacccctggtgggccacggtgccactgcagagagggccatgacttgcagcctgatgggaggagctgtcaggtccgggacctttgcaatggcgtggaccatggctgtgagttccagtgtgtgagcgagggcctctcctaccgctgcctgtgccccgaggggcggcaacttcaggcagatggcaagagctgcaaccggtgccgggaaggccacgtggaccttgttctgctggttgatggctccaagagcgtgcgtccacaaaacttcgagctagtgaagcgcttcgtgaaccagattgtggacttcctagatgtgtcccccgagggcacgcgggtggggctggtgcagttctcgagccgcgtgcgcaccgagttccctctgggtcgctacggcaccgcagccgaggtgaagcaggcggtcctggccgtggagtacatggaacgcggcaccatgacagggctggcgttgcggcacatggtggagcacagcttctccgaggcgcagggtgcacggccccgtgcccttaacgtgcctcgtgttggcctggtcttcacggatggccgctcccaggatgacatctcggtgtgggcagcgcgcgccaaggaggaaggcatcgtcatgtacgccgtgggcgtgggcaaggcggtggaggcggagctgcgcgagatcgcctcggagccagcggaactgcacgtgtcctatgccccggacttcggcaccatgacgcacctgctggagaacctcagaggcagcatctgtccagaggagggcatcagcgcagggacagagcttcggagcccatgcgaatgcgaaagcctcgtggagttccagggccgcacgctgggggcgctcgagagcctgacgctgaacctggcccagctgacggcgcgcctggaggatctggagaaccagctggccaaccagaagtgagggccacggacggcccagacccgggctggggcgcggcaccacggacggtgccccttgcgcgccatcggtgcgccggggccaggcagaacctgggcccgtccggcttgggctgtcggggcggaggcgctggcgggcttccggcattgagctgagttggcctcgcccggaccattaggcggactgcggcgtcagggggatagcgggtggtgagggaaggggcacgtgctagaccggcacgccctcgccgcgtgctgcgctcagttctttgttggatttcttgtttgtgttcttaaaaaaataaaaaaaactgatttccacgg

SEQ ID NO: 167 - protein, 575 aa, Homo sapiens; identical to SEQ ID NO: 165

SEQ ID NO: 168 - DNA, 2574 bp, Homo sapiens
gagtgtggctgccccggtctccccagtctcccgctgtagctgacttccagcctggcccgcagctagccctgtctgcagctccaagcgtggtaggagcagggggtgctgggtttgccccccctcaggaggaaggggggatccctccctgccagtgggaggggttgcagcctgcacttccccctccccacccgccagccctgggttaaatgcggccgttgcctctgtgtgctccagctgcctggcagtccccacctagggcacgctgccacgccgccgttacctggtccaagtgcccgggaggctccgcctgtcggcttcgctctgcagctgcatctctgatctgtcctgcaggctcaggctctgacacctccattctctgtccccaagcgccatgagaggccttctttgctggcccgtgttgctgctccttcttcagccctgggaaacccagctccagttgacaggtcccaggtgtcacactgggcccctggatctggtgttcgtgattgacagctcccgcagcgtgcgccctttcgagttcgagaccatgcggcagttcctcatgggcctcctccgaggcctgaacgtgggtcccaacgccacgcgcgttggcgtgatccagtattcgagtcaagtgcagagcgtcttccctctccgcgcgttctctcgccgcgaggacatggagcgcgccatccgcgacctggtgcctctggcgcaaggcaccatgacgggactggcaatccagtacgccatgaacgtggccttcagtgtggccgagggcgcgcgaccgccagaggagcgcgtgccgcgtgtcgctgtcatcgtgacagacgggcggccccaggaccgcgtggccgaggtggcggcacaggcgcgcgcccgcggcattgaaatttacgcggtgggggtgcagcgcgcggacgtgggctccctgcgcgccatggcatcgcccccgctagacgagcacgtcttcctcgtagagtccttcgacctcatccaggagttcggcctgcagttccagagccggctgtgtgggaaggaccagtgtgctgaggggggacatggttgccagcaccaatgtgtcaatgcctgggccatgttccactgcacctgcaacccaggctacaagctagcagcagataacaagagctccattgatctgtgtgctgaagggacccatggatgtgagcaccactgcgtcaattccccaggctcctatttctgtcactgccaagttggctttgtactccagcaggaccagaggagctgcagggccattgactactgcagctttgggaaccatagctgtcagcatgagtgtgttagcacccctggtgggccacggtgccactgcagagagggccatgacttgcagcctgatgggaggagctgtcaggtccgggacctttgcaatggcgtggaccatggctgtgagttccagtgtgtgagcgagggcctctcctaccgctgcctgtgccccgaggggcggcaacttcaggcagatggcaagagctgcaaccggtgccgggaaggccacgtggaccttgttctgctggttgatggctccaagagcgtgcgtccacaaaacttcgagctagtgaagcgcttcgtgaaccagattgtggacttcctagatgtgtcccccgagggcacgcgggtggggctggtgcagttctcgagccgcgtgcgcaccgagttccctctgggtcgctacggcaccgcagccgaggtgaagcaggcggtcctggccgtggagtacatggaacgcggcaccatgacagggctggcgttgcggcacatggtggagcacagcttctccgaggcgcagggtgcacggccccgtgcccttaacgtgcctcgtgttggcctggtcttcacggatggccgctcccaggatgacatctcggtgtgggcagcgcgcgccaaggaggaaggcatcgtcatgtacgccgtgggcgtgggcaaggcggtggaggcggagctgcgcgagatcgcctcggagccagcggaactgcacgtgtcctatgccccggacttcggcaccatgacgcacctgctggagaacctcagaggcagcatctgtccagaggagggcatcagcgcagggacagagcttcggagcccatgcgaatgcgaaagcctcgtggagttccagggccgcacgctgggggcgctcgagagcctgacgctgaacctggcccagctgacggcgcgcctggaggatctggagaaccagctggccaaccagaagtgagggccacggacggcccagacccgggctggggcgcggcaccacggacggtgccccttgcgcgccatcggtgcgccggggccaggcagaacctgggcccgtccggcttgggctgtcggggcggaggcgctggcgggcttccggcattgagctgagttggcctcgcccggaccattaggcggactgcggcgtcagggggatagcgggtggtgagggaaggggcacgtgctagaccggcacgccctcgccgcgtgctgcgctcagttctttgttggatttcttgtttgtgttcttaaaaaaataaaaaaaactgatttccacgg

SEQ ID NO: 169 - protein, 614 aa, Homo sapiens
MRGLLCWPVLLLLLQPWETQLQLTGPRCHTGPLDLVFVIDSSRSVRPFEFETMRQFLMGLLRQVGPNATRVGVIQYSSQVQSVFPLRAFSRREDMERAIRDLVPLAQGTMTGLAIQYAMNVAFSVAEGARPPEERVPRVAVIVTDGRPQDRVAEVAAQARRIEIYAVGVQRADVGSLRAMDPLDEHVFLVESFDLIQEFGLQFQSRLCGKDQCAEGGHGCQHQCVNAWAMFHCTCNPGYKLAADNKSSIDLCAEGTHGCEHHCVNSPGSYFCHCQVGFVLQQDQRSCRAIDYCSFGNHSCQHECVSTPGGPRCHCREGHDLQPDGRSCQVRDLCNGVDHGCEFQCVSEGLSYRCLCPEGRQLQADGKSCNRCREGHVDLVLLVDGSKSVRPQNFELVKRFVNQIVDFLDVSPEGTRVGLVQFSSRVRTEFPLGRYGTAAEVKQAVLAVEYMERGTMTGLALRHMVEHSFSEAQGARPRALNVPRVGLVFTDGRSQDDISVWAARAKEEGIVMYAVGVGKAVEAELREIASEPAELHVSYAPDFGTMTHLLENLRGSICPEEGISAGTELRSPCECESLVEFQGRTLGALESLTLNLAQLTARLEDLENQLANQK

SEQ ID NO: 170 - DNA, 49338 bp, Mus musculus
  misc_feature (1)...(49338): n = A,T,C or G
gtcttgtgtcaatttatatggttttatccagtctccttccttctggagctccaagtttacatacacaagaccatgtggttgtgttccatacattcctcgagttccatttttattttctcgtgttctagttatattttcaaatgatatatcctctatgtttctcacttttgaagtcttttattgaattggctttagattaattgtatcagccttgtacctggtgctcagtaaatacttgctgagtaagcaaagatcaggagaacaaagacacgaagggctgacaagaaacagcacagggtgtgaagacagtatgcattgtttatgttcccaaagtagacttttacatgcagggtacacagtgataaaagacgggactaacggcacacgttgaataatgaaggagcaagaagctcaggtctcaaacattatgaaggtaacacacataatcagtagatgaaccaggaaggttggttccatggggcaaagcagaacaagaagaaaattatttttacactgcagataccaaagggcaagaggatttagaagaagcgagagggaaattggggttctgggaaagcgtcaacacaggtgatttcttttcataactgcttgcttctgtcttaaatagcaacagaagatgtgtgattatggatacgtgcctacagcttccggatctgatgagatagcatagaaacacaagagcacagactgactccgagacaaaactgtttgcaaccatgggtgggcctatgcgttaaacagaccattcagaacaagggcatggttcagcaggaaagggcatttgccaccaagcctgacaatcctgcttaatgtccagaacttatgtggtggaaagagagaactgattccctcgaagcagtcctctgagccacacgcgtgctctacggcatacaaacacacattaatgtaaagaatagactctataacgtctctataatgtctgaaaagagaagcaatcccatattttaccgagacttgatgccatatatcttaagagatgtgtggaatctaatggaaactccaagcgctggcagaaactcactggcttgcctttggttgctctcttgtggaggaaacactttccttaccttgttcataagtgcctaccactgcccaagatgcacccagtcaccagacatagtcaggtacagtagacattcacattagtgaactctggtagagtggggccagaaagctgagcaactgggggagccatctagagcaagggtgaggtggagacatgtccgaatcctgaaaatctcatcctgaaactgacaggagtaggactgttctccccctgctctgggcctgcatattctggtgcatgtagccttgagactctcacctctgccatctctgaggtagtcacatagcttggtagccaggttacaggttaaacttcctctcttcctataaggatgtgtccagcaagcacctgaaattcctcctcatgcatatgaagcattcccagctccccaggcccagccaatgctgtcctctcactctgacaattcctaccccattccccaaggtgtatccatagcccttgttcccctccttcccaataaggagagacttttcactaaaatctttctccagagaaggctgtttctcctgcattcacaacaacagagatcttgcctaacccacccagctggataagctccacttctttcagtccagcctggtgtctaatgtgcctggataccctgaagggagaagcagaccaggggtggcttggtgtaaaaagagaaggttaatgtcctttacatttctaccaccatggttctgaaagctcgagtcaacacacaagcataagtttttttttttttttgttttttgggtttttttgttttgttttggtttttggttttttgttgttgttgttgtttccagaaagttggttagaagaagtggagtcatggctgtgactaaactggaccaagtagttcagagtcttcagaaatagtttttgagagggcttagaaaattttgaagaaattggcctgagaaagccaaaagtgtctttagtgaactacactaatgagaagttatggtagaacttaatgactgaaatgttggcaggaatatagacaacagagattgtgatggtgaagtttcagtaggaatgagagtgctactgtggactggactcgtggatactcatgttattttgtgacaaagtccgtgtctatattttgtttctattctgagactctgtggtagactaagtttcaagatctctggaagataaaattccaaggcagcccaagatggagcactgctattgctggcttcttttagccatctttacgctgaaaactgggaacaaaagcagaacatagacattagaaaccactgtgtgcatcggtaggaaaacaagaccattgaagctgtagacaaggaaggtgtataaagaaggagataaactcagttaaaaggaaatgagaacaattcactatgggcaataggaaagaaatctcaggaattcctaagaccctacccattcagagtataaaatagtaaacttatttgaaagttttttccccctggagaagagagtacactcagaggctggaagagacgtgcgtgtgtgtgtgtgtgtgtgtgtgtgtgtgtgtgtgtgtgttttaaattagatattttcttcatttacatttcaaatgctatcctgtaagtcccctataccttccccatgccctgcttcccaacctacccactcctgcttcctggccctgacattcccttgtactggggcatataatcttggcaagaccaaaggcctctcctcccattgatggccaactaggccatcttctgctacatatgcaactagagacacgagctctgagggtactggttagttcatattgttgttcctcctatagggttgcagaccccttcagctccttgggtactttctctagctcttccattgagggccctgtgttccaatagataactgtgagcatccacttctgtatttgccaggcactggcatagcctcacagagaaagctatatcagggtcctgtcagcaaaatcttgctgacatatgtaatagtgtctgggtttggtggtttttttatgggatggatcccaaaatggggcagtctctggatggtccttccttccatctcagttatgaactttgtctctgtaactccttccatgggtattttgttccccattataagaaggaacaaagtatccacactttggtcttcattcttcttgagtttcatgtgctttgaaaattgtatcttgggtgttctaagtttctgggataatatccacttatcagtgagtgcatatcatgtgagttcttttgtgattgggttacctcactcaggatgataccctccagatccatctgttgggctggagagatggctcagtggttaagagcactgaatgctcttccaaaagtcctgagttcaattcccaggaaccacatggtggctcacaaccatctgtaatgggatctgatgcccctcttctggtgtgtctgaagatatgtgttttgtatcacatttccttcaactgaccaaaaaattaataagatgaggcaagtgaatgctgatgtatggcaatgggaaatcaaatacatttttttaggttgatggctgggaaatgcacagccttcaccataaaggaacatacttctagtaggaagttatcagctacaaggtggatgagttagttactctgttcacactgggaccaaacacccgaccagcacaacttaagacaagggtttcttggcacaccccaaactttcctttgagtcttttaagtctctatgactctgtagcttcttacaaacatggctgctgaactagcaccatgttgctgatgacacaaaggtgaggaagtgcttccaagagatccagctgtaaggcattttctcaaatagtgattaagggggaaaggcccattgtgggtggtgccatccctgggttggtagtcttgggttctataagagagcaagctgaacaagccagggaaagcaagccagtgagtaacatctctcatggcctctgcatcagctcctgcttcctgacctgcttgagttccagtcttgacatcctttggtgatgaacagcaatgtggaagtgtaagctgaatcaatcctttcctccccaacttgcttcttggtcatgatgttttgtgcaggaatagaaaccctgactaagacagagtccatgtgggctgcagtcaggaaggctgtggattagagctgtccagcccttccttagaagcctgtatcacaccaagaaatgtgccagatgccaggcatgatctgcaggattatccaattgccctctggagtttggtcttgctgtgtctgtgccttctttcaatgtgctcctcttccttcttggaatggaaatgtatagcatgttccactgctgtgtgctagaactatgtctttcatttttgcttttacagaggctcacagccaagagttctgcctgagtctcagagggaatttgaacttagaattttgaaaaagattaaaactcttgacactttggggattgttagacatggactaaataaacttcgcattgtataatgaacacaaacctagagggatgaattggagtgttctctacaggagcagaaccgatagaatgaatatatattaaatgagagtttatcgggttactgtacatgtgtaccagtttgggtaatctaacaatgactgtagccacactggagaaagctgaaccagtagatgttcagtctacatagttggacgcctcaaaagtccaaatgtagggctgagggtctggaggattcctgaagagccacccatcttcatcttcttggaagcctgaagaggctcggttctgatatcagtgaagaaatgaagcagcaaggtgataaatgaaccgagcagtgtaaggtgggaggccatgaggggaaagtgaagctttgtccccagagctccttttatctgggctgcccagccacatgcaggatagatctttctacttcacatcacctgagcaagaaaagcccttcgaggtgtgtccagcagcttacttctcggtttcttccagtcaagtactgacacaagaatcaaagacagaatgtgtggttggagtctaccatgccttcccaaagctcctgtgtggaagcccactactgcagatagggcttagaggaatccattggatcaggaaagctctgacttactggttgcatctatccactcatggggtcataatttgagagcacagttgtgatggttgagatttataggtttgtgcctagtgggaggagctgggctgcctgggaggtgctttttgaaggacatattttgtttctggaccccatttgtctttgttttttcttcctggctaacagaggtgagtagcattctccactacatattcctgctgccatgttgttcagcctacctcagtgttggagccaaaggactatggattaaagattcttatactatgagtcaaagcgaaactccctcatacaaaataaagtagtaaggaccctgttttcctcctcctgggttgccttctcctgccttgatgtgatggatggcatgtgtctagtctcattgtagcttgttatgcagtgtttgaatgatgtcccttggaagcccgctcttttttgaggtgaggcagggtgggtggatcttggggaaaggagagattgaggagggaggaagctggggagaggagagggaagggaaactgttgtcatgatataatttatgagagaagaattttaaaaaatattaaaggtcctaaagaaaaaaaaaaacaagaaaacagagagatatctataagaagaaatctaaaataattaggaaagttcttgagctacatgaaagcatctcaaaagactgacttaaaacttaggtctggatttccaaatacagcagatcactcaaacaacagaatagaaacagctgaaaaatctaacaaagatctattacagaagatcaagtgaagggcgtatatatgtacgtatgagaaatgatacagaaaagttctaacaataagaatggaagaattcctatgatccacacagtaagagcttcagccatcaggacagaggagacattaacacggtagcgtttcataagcaaaacgaaactgcacattgattcagaaacaattaggggatacatacaatgcgatacttatatatcatttgactgttttcagaaacaacaacaataatcttccttatttatttcaatattctcaaaagtttgcttcaaaggtccaatactcaagacagtatttttcatttgataaaatgctagtattagtagttgtgtcacatgcttagattcctcatccaatgaaatgtgcatatttaaagccaagtgctttcttactttaaacgtgttgctttgggtgttgctgaaaatagtatacagagttgagtacatactgaccttggtcacagcaacttttcttcagaggaaagcttaacagggagtgtactgggtaaaagatgggaccaggctgtctcatactgcagtgggaatgtgaaaattagcctctatcctggtggtgatctgatggttcaagaagagaccctggtgagttctgctgtgtagatttggacgtaggaaatgtttatgaaaccggtgtccttataccagttaactaggaaaagtaatcaccagggacagaggataatgactgacattccttgttgccctgaatgggcccgatctcctctgatctcggaagctaagcagggtcgggcctggttagcacttggatgggagaaacgttgaggcaggctagagtgcaattcccaacactggcccattgcttagtgtttctgagttccaagctcctcacttgtgcctgactcatttccttcttccggataacatgtctttctctcttgctttagaatcccccagtgctatttactaccttcaaaacttcttttgaccaagcacttgccatatacactaaaactagctgtactgtgcatggctttcccaaaagaatttttcactgaagacaatgattctcacccttcctaatgctgcaatcctttaacacagttcctcatggtatggggaccccaaccataaaattactttgttgttactttataactgtaactttgctactgttatgagtcataatgtaaatatctgatatgcaggatatctgatatctcccaagggggtcacgacccacagattaagaacagctggtctaagagagcaatgtttctctaagggtcctcttagcaccttgacaggatcacacctatctttatagtatccctgtggcatgggtttatttatttaatagttgctcagttttttactatgtagacattaacactgacagacagaatggtccagccgcatcacaaagcaaggagagccagcatgaaacctgtatagaagaacagaagacatttttcatctaagcatgtccttcgctagctgggcatgatggcgcacgcctttaatcccagcactcaggaggcagaggcaggcagatttctgtgttcgaggccaacctggtctacaaagtgagttctgggacagcctgggtaatacagagaaaccctgtctcaaaaaaaaaaaaaaaaaaaaaaaaaaaaaaaaaaaaaaaaaccacccaaccaaacaaaaacaaacaaaaaagaatgtccttcgctgaggctgcaaaaatggccctggcgttatgaccacttgttactcttgtagaggacctgggtttggttttcaggttccacatggtggttcaccagcatgctggaacttcatgtccaggtatctgaggctctcttgtgacctagaggacagcaggcatgcacgagatgcatgcacacatgcagatggaagcagatgtacacagaaaaaataagtaatcctaaaagcaaaagaatgtccttgataggccagtaaaagttgctgttgttatagcttgacacttagatctcgattttaaaaacaacatcctgtgggcaaagtgggaagtgtgcattttgaacctttctgctatagaatgaggtggtggtcttgcagacgcgctgatgcctggttgcaagctgatcacaagacaggtaaacttggttattctggaaaatgaataagacgcttgtcaatttaagagcaactggcctcattagtggctaacgatacaactcaagttctcaaggaaaaaaaatcatagctttgagaaacttctgtcacagaaatgtactttcccaaacactaaagattctcatgattaaataaaaaaagtggcatagatgatttagactcttgctattgagacataccatgtgtcagcactggacgctctgtggaacccaatcaatactttccaaatgaccaatgaatgccttgtgttggcatcggttcaagtgtccctggataagagattcgctaaaagaatacgaggaaccatggatctcattgtagcacagtgagaaaacaccacgatctcaaagacaggtcaccagtgatacatggcccctgtggaagtgtctgttagagaactaggctgagacaaatgcccaacaaaagtactacttaaaaaggttagaaacacccaaggtttataggtgttctaagggacagcacctcacctttgaaaacatatcagatactttgaacatgtatactgtgaacttgtatcaaaatttgtaagagctaatatttgtcacctaaaggcacaattctgattcaagacatttttttaaaaaacttttaaaacatattttttaaaacatacatttattctagttgtgtggtacatacctttaatcccagcattgaggaggcagagaggcagagacagagagaggcagagaaaggaggcgagggcaggtgcagaagccgacgaggcagaggcaggggcaggggcaggggcaggggcaggggcaggggcaggggcaggggcacgggcacgggcacgggcagggggcacgggcacgagcacaggcacaggcagaggaggcagagatggcagagaggcacaggcagaggcgagtggatctctgagtttgaggtcagcctggttcatatagcaagctccaggccagcctagtttacatacagagaacttgtctcaaacaaataaaccaaaacgacaacaaaacaataacaaaaatatttgtgcgcgcgcgcgtgtgcgtgcttgcgcacatgccggaggaaaaggatgaggattcttctggtcaaattcaggtcctcaagataagttgcaagtgccttcaccagctgagccgtcttattggccctcagcataaggatttcttaagcagtgaggcttaactctgacattagctctgctaacagctctttcctgactgttccatcatccccacgctgggaagcctgcatgcagttttgtaccctctacccatccctttgtctagttcttcctggctcacccaccccattcttttcctacttcattcctctcttacgggagtctataggctcattggagcatctgccccatttgaagtcacttttgagatgaagataaaggcacttgggagggagttctagaatttccccaagtcttcccaatagcccgtgaggctatatttggagggataactgaggctaaacctcacgattcttgatggtggtctcctctaagattttgagagtggtgtacaggaaagggcttcggacggagttcactagagctgactttttaaatcttacagaggaaactgaggcccagagatgcaaaggataggggccagcctagagagccagaaaccaaccactggacccaacccacagcctccacctcagagggccctgatggggagggaggaggcgggtccctgagagcgaagaagagtgggagggcgaaggaaaggaaggagggcagatgtgggagtgaaagaggcaccctcctggaggctgattggctctggaggccagctctctccacgaggtttataagagttagggctgcctggggtaccctgccatctctcccacgtcccggggagccactgccaggacctctgtgaaccggtcggggcgggggccgcctggccgggagtctgctcggcggtgggtggccgaggaagggagagaacgatcgcggagcagggcgcccgaactccgggcgccgcgccatgcgccgggccagccgagactacggcaagtacctgcgcagctcggaggagatgggcagcggccccggcgtcccacacgagggtccgctgcaccccgcgccttctgcaccggctccggcgccgccacccgccgcctcccgctccatgttcctggccctcctggggctgggactgggccaggtggtctgcagcatcgctctgttcctgtactttcgagcgcaggtgagtgattgacatccctgtccgagtctctgcggtgagttggggggtggggtgggggctgagtctggttctaggacttattctggaagggaaagagacccaaccccccacaaggaagggaagttgggggcctccagccaagctcatctcctaccagcgcagcgtgcagaagctgaactctgattctggctgaggatgggtttgaatttccccccattggccgctcccctcgtgtgcctcaagtgatcgcacgctttctccccaccgtgaatttttcacttggagttaagaaccaacttcaactcgtttagggaaagtggggaaagtgagaacttttacttgggcatctaagcttcccaatgccactaaccgacctgttccctgacactttgggaccacaacgtgtcagtagtctttggaagagctagggatgacactcacaattcatacagtgacagcgctatcagatgtgcccggtctcaggtctggggctctggggctcctctggagctcaggttctgaaaggtgaagggacagccccactgcgcctgcctaggaggtgggtggaggaaggaaggtgcctctctgtgtgtgtgtgtgtgtgtgtgtgtgtgtgtgtgtgtgtgtgtgtgtatgcgcgcgcgtgtgcctgtgtgatagtttagcctgaatacaatctagccagtaaccaacctttgaagagaggaggaagctccgtgctaaagattcagaacctcggggagatggcagagggaggaaggggtaaatttgtaatattatgctttctggtggtttgtgctcttgtgttttcttggaaattgcagcgcagttggtcgtattcattcaaatactcttgtctggtgctatgaattctttctcagaggaagtggggggctgactgtgcatatttttatgggaaaagaaagttgggtttggacttcgtttgtttccagaatccgaggtgattactaaaccgaactggatgcattacaatgtgtcattgcttggactgcataggtttttgacatgtgccaaagccttgagccgtactttggatcacgggctttgttaagtcttcagacctactggtttgcattttatcccatgctgtggttacccactaatgcaaaaacagacagaccataagccagtccttctgaaaaccagggtctccatgctcataatcacatgcagtacctgtagagattttcttcctcagacaaggtctgagtggtttgcttgcgatatgaatcacagaaatctgtatgaaagtgagtaaacatccaccccctttcattgggatacataggaatcaatgaagaatggcttatctgttgttttctgccgtctgccattttaatggatgtgtccagagaccctgcatagttcatgccagtatcaaatgcgatgggattggcttagaaacaactctatatgcagtccccgtgtctttctgtgtgtggtaccagaggatagcgtgtgcttccaaggaaaggctattgtaattctttgcaaagagactttaggccagaagatatgcagtagttctcagtgtcttctatttttttaagcctgttggggtcacagcatcttttcccagcagtaaaagtgatgtgagcactgaacttggaaagaagtgtggggtgagcacgttctcggggttcttagcttaccaggaaccctgggacttggcatggctgtggaggaatgagtcaccagctgtgttcttgtccagttttcctgaaggaattctatggtggtagggtgacatgagatgcctgtcactctaagggtatggtcaccttttaccttgatggcataaaaattgtacaaaacaactttttcccaatgtaaacacttgagatagcactcggagccaggtgattttcctctggaggatttaatgtcatcagaattctggatccaagcgtttgtcttctcttttccttcccccgccctcccctgcccccgtcccttcttctcttcctccatctcttccttcctagctagggtctcatgtagcccaggctgacctcaaatttgtcatatagccaaggatattatacctccaagatagtgtttcagatatgcatcacggtgccccatttatgtggtgtgatgcttgggactgaatgcacatacatagctttgtgtgtatgttaggcaaacactgtaccaagtacactgactgtacctctagtgcccggttgctgcaaggattgagtctctcagagacttacttaaaataactttagtcattattctgaacccaggtctgtcactacattgttaaaaggtcgtctccgtcaccagggtagttttaggaaaatgtttgaatattctgactgcatctcactgagtgtcgtatggcatccgcatttgacacctcaggggaccctagtcacttagagatacatccagaatcccttgcccatgacatgctatgtctggaaaatgctccaaaatgactgagtacgtgcaggcgttgggagatcttagcttatgcgggaagcgaggtctcttgctgttggcgaatggttgttgaggataggttttgggtacacaagggttcgatctacaactcttttcctttttatatattatggaaaccttcttttgtactttaggtattggtgttgactaggattctgttttctttttttaaagttcttttaagtttttaagttctggatgaaatacttggaattgaaatcatctcctatcagggaacacatttatactttaagataaagcaagccagatttattacagtttaaagacattgaaaagagacaatatgaattctctgaagcaaaaggattggaagttccaggccagcctggatcaaaacaaacaaacaaacaaacaaacaacaaacagaaccaaagttaaaaccaaagctaatgcaaaatcaacctgggtgttttagattgtctatgtctacattttaaaaaagccaggatccagtgtagatggccttttcccaccaggcctgccaaaggggccttgtggtttgtgctatgtatttactacatagtattnnnnnnnnnnnnnnnnnnnnnnnnnnnnnnnnnnnnnnnnnnnnnnnnnnnnnnnnnnnnnnnnnnnnnnnnnnnnnnnnnnnnnnnnnnnnnnnnnnnnnnnnnnnnnnnnnnnnnnnnnnnnnnnnnnnnnnnnnnnnnnnnnnnnnnnnnnnnnnnnnnnnnnnnnnnnnnnnnnnnnnnnnnnnnnnnnnnnnnnnnnnnnnnnnnnnnnnnnnnnnnnnnnnnnnnnnnnnnnnnnnnnnnnnnnnnnnnnnnnnnnnnnnnnnnnnnnnnnnnnnnnnnnnnnnnnnnnnnnnnnnnnnnnnnnnnnnnnnnnnnnnnnnnnnnnnnnnnnnnnnnnnnnnnnnnnnnnnnnnnnnnnnnnnnnnnnnnnnnnnnnnnnnnnnnnnnnnnnnnnnnnnnnnnnnnnnnnnnnnnnnnnnnnnnnnnnnnnnnnnnnnnnnnnnnnnnnnnnnnnnnnnnnnnnnnnnnnnnnnnnnnnnnnnnnnnnnnnnnnnnnnnnnnnnnnnnnnnnnnnnnnnnnnnnnnnnnnnnnnnnnnnnnnnnnnnnnnnnnnnnnnnnnnnnnnnnnnnnnnnnnnnnnnnnnnnnnnnnnnnnnnnnnnnnnnnnnnnnnnnnnnnnnnnnnnnnnnnnnnnnnnnnnnnnnnnnnnnnnnnnnnnnnnnnnnnnnnnnnnnnnnnnnnnnnnnnnnnnnnnnnnnnnnnnnnnnnnnnnnnnnnnnnnnnnnnnnnnnnnnnnnnnnnnnnnnnnnnnnnnnnnnnnnnnnnnnnncatacacacacacacacacacatatacacacacatacacacacacacacacacatacacacacacacacatacacacacacacatacgcacacacatacacacacatacacacacacacacacacacacacacacacacacacacacgtttatttcatcgtcacaacatcatccgttagggatagttgcattttccaagtcccctgtttatcccctgtttgtctgtgtgtgtggtgctggggatggaacccagggcctccagtatggcagacaaatgctttcccagccccaaccttccttttacaatcagataactcaagatttagtgttggcaggtatacctgtaggtgtgactcactgtaactcagtttgctatgctcttttgtggaatgtgatttgatatgccttccagggaaagacaaggacagcttgtttgttctgttcccctgccccaccaacccccagtatctaacacaggacctgaagtactgaaagggcctttcaaatgatttgccaccccacacatctttccatttctactttactattatgcaaagtaagtgtctagtagctgacatggtacaggtcttcaaccgtgaaagtgctctatctagactgcccagtaccccagaacatgctgctgggtgggagctacatgcatttggtcactcaacactctgttagtcttgcccaccaaccttattccttgccccgccttccttccgcagactgtccttggttacctgtgcatttgcccctgcgcctctcaaacctccttccttccagggcaccggaaggagaaaacacatcgggttagagacacaaagcggctttctgacttgggatgcttaagaaagaaaatgagggaacaaagttaatggttgccgagtaatcattctttcttcattcacagtaaatgatgaggtcttaaacatcatggagatgtgacgagtggctcttaagtatattttgaatgaaagattcgacaactgaatctaacttaggcacgcgataaaattgtccaagggctccaaatgagccatgtttatttttatgtttttatttaagagagaaaagacaaaatctttgcattctactttttaatttgctccaaatcgtgtaccgttattaggtgatgcaacattgtgctaattagtgaaccttgctgtggggtggaggggatttacattcatgttcataccagaatagctataagagctatatgtatttgtttatttgacacttcgaagcattatttctcagagaaataatattttaatacagagaacatgaccttggatctagttaatatgcagctccccataagcccatgtaggtgattagctacatcctaaatactgacagtgttggaactgctgcttctgttagatagcttcaatttgtttgtgggatgcaagtctaaggaactttgtttagagtctccgggcatttcttaatgccacatggtctcttcagctcaggtcttatctggtaggaagctattgcagaattctgctttcctaaggtctgaacccagctatgattgacagctgcccttcagtgaaaactcacactctctgatctgtacttcttattgtaaagaaaatacatgaaatacgtacgcattgcaagtaattttgtttcgtggtatgacctcacctgtgctttcagagcatccttatgtattttagagctttaatgcttatttttttatttagttgtgtgtatgtgtctgtgtgtgtatgtgcatgtgtgcagacaccttcagagagaccacaactaggggtcagatctcttgaagctggagttataggcaacaaatactcctgtgtgtgtgtgtgtgtgtgtgtgcgcttgtgtgtctgaaaatatacaaaattttaaaaattatttttatttatgtgcattgttgttttgcctgcacatatgtctgtgtgatggtgtcaggttccctggaaccggagttacacagtttgcactgctatgtgggtaccaggaactgaaagagcagtcagtgctcttaactgctgagccatctctccaggcttagatgatccttctattggcatgactagaataataaaacatgtctctgtgtgcatagagaggggaccttttagattgtttctgaggattggttaataacggcatacatctttctgtgtattttaattaaatcaggaaaggagatagtttatttctgactgagctttagttattataaactttgcctttggtctagtttttatttactgacttctgaaaggaagaggacatgttaagctgttaaaacaatcaagttcagctgagtggtagtggcacaggcctttagtctcagcaatctggaggcagaagcaggcagatctctgagttcaaggccagcctggtttaaaaaaagccagttccaggacatcaagggccacacagagaaaccctatctctaaaaacaaagcaaaacaaaaacccaacaagaacaaactcccttttctatggtgatcgaagccaccgaaaaaccttgagggggcttgggaaatagaagacaagattctagaacagcactcgcagagaggctgggctgggtgggacaccttttttaaacccagtgtccagctagtaactccacggggatgtgttgggcaagacaatgcttatattttagtatttgctagcacttgcccagatagcctgcaggagtgtcctctccaccttagagtgatgagggatgtcactttaacatatttgtaggatccaggcctggagtactagctacatagtattcatcagaaagggaagttacataatattcatcagaaagagacgttacactcctggcttccggttttgattgaggtgcagatgggtttctcattcttttctttcactcatcaaaatactcatagattagggaagaagaccaatggcaacagtagctaaagattatgctaattttgcctgatttatgcaggcttcaagctttggttcttaaagtgggcttcatctccatgtggtttcatctagcattttggcttgtgtcttattcgtgtttatgagacagggtcttacacggtagccaaggcttgcctggaaaccactgtgtagcccaggttgtcttcatactcagtgttccttctgcgttagagtctcaaatagattataactatgagccaccaatctagtgtcatgagtcttcccctgcctgccgggatcacgtgtgatatctgcgatacctcttctagccacgaagaagttcaattcctgaaaattatacacgtacattttttgttgttgttaagaatctatggcctcatgtatctggggtgattgtcagctactcatcaaagtgaattagaagtcagtgtgtccagggcaggggaaatggatccatcaataatccttgtgatgggacatagagacaggagatcctgaggtcttgctggccagccagtctggtgagccagacagtgagctctatgttcaatgaacatcctcatgtcaaaaaattaaagtggagtgtggaacacactcctgtgtaccacatgtgcatgcacaggtgttcatacccattcacacatgtgtgcatacatacttacacactccaaaaagatgttttaatatgtattaaaataaaattatatatatataatatatatatattttataccacacttttttcaagacaatgtttctctgtgtaagcattctggctgccctagaactcactttgtagagcaggctggcgtctcactcacagagaccgacctgcttctgccttccatatgctgggattaaaggtgtatacgaacatgcctggcttgaggataattttattatcaaccactggaggatagaaaagtctaagcatgacccttctcttatcaagtcacagttcattaactataacccctttcatatcctttcccctcgtagatggatcctaacagaatatcagaagacagcactcactgcttttatagaatcctgagactccatgaaaacgcaggtttgcaggactcgactctggagagtgaagacacactacctgactcctgcaggaggatgaaacaagcctttcagggggccgtgcagaaggtaagtcctccctgacgtcgtaaagtcaagggtcttgatgatgctacagtaactgaatgttaaggcttgtgaagggctaactaaaaaatctatatttcatctctgctaccccagacccaattggcgaagtgacccactaggtccactttcctggattcttacatgctggcgggcctttaggtttcatctttctgcttctcagtcatggccattctccgtctctcccgctccctctcggtcccttgcccagaccatctaaaagtcctgcccagccttcctgcccagccattggctgtactgtggcaattctttattatcgattgaagctagctgagggcagggaccctcaggtctggaagctcagcttttgggagtgaaataagacaaagcattagaatcagttcccaaccatgtggtgagagggaggggtccggagcaggagatatagtgatgtgcgacacgggtattctgtgcttctgtctcatgttctgggagagctgggccacaggagagatgggaatggagaagactggtgtcagcagctgccaccgagagaaacatacctgcctgtcagggtttcctgagcctcctgggaattctgctgccccagaactagagtacttactgactccaccaaaaactcggtaggagtccagtgctcagtgctgtgtgtctgggtgtgaacccatgcgctggccctcccagcttccagatggctactccttgctttgcctcatcatctcagagtaaaccctgaccgtctcaaagccattggaccttggatttgttcagacttactaattagctagtacaacccgttctagcttagctcttcagaggcatagtgtaggtctgacagtgtcagctaaaagtacaggcaaggtataatacttttaaggtaagtataacattttgaaggtgaggtttgcattttattagacttacttcgttgtgtcacatcgcccagacaatatgctaactaaaaaaattcaacgtgatcatcacagagtctacttgcatcttaatttcagagatgactaaaactgagtgtcgtagagttgatgaaatagatgttattgtagcaagcacaggaaggcgtgttgcttatggcagccttatctgcctgtgtgaatatatgcatgtataatttaatacagtatacaattattttaaataagtgaacacaactcggattaggggaaaaaactttaccagtttttaaaaagttatggctttccttggtctgggatgaacctcagtagtggaatgtgtgtttattgtgagtgaggctctgcattcagagtcagagcctggcaaactaggactaaggctagcgtcaacaatagagtcaacggcttctattaaaggcacatggttaccaggtgtagcccatgtctgtaatcccaaactgcggcagggggattgtgaggttgagattagcatgagttacataatgaaacactacctctgaggaagagaggaggggagggatggaggagggacagggggacagaggggggcttttctattaacagataataatggctcgctctcaagaggaattggactgtatttaattaattttgtacttgtttttgctatgctgtaggagtttacatgtaaaaaaatgagcaatttataaaatctttttaaaagctcaatgaataattacaataagccagtacatattggaatagcatgcacattattgcaatgcgccagcatgtgctggaggagatggctctgtctctttggaggcctgatctttaggagggagatgaatgtttcccaaaccttatcattacagttaaccgacatccatagggtgcaactgtggatggaggcactttgccagacctttttcttatgccccagaatgtactcttttatcctagtcaaatgaacggggtttttaccaaatgtattatcctttgatgaaaaccactggttaatgtgacgtccgagtaatttgccacagtaatcagatttctcatttgtcttggcaaatgctaaaaataggaagggtgtggtaagcactctggaagtagtgtgcacatcttagctttagctctaggagatactgagcgaacccaaagaacaattcaggtgtagctgccatcggctttgagagatcagcccatgcagcggtggcccaggccagacatgggtgcaatatcacgttataggcgggcagaacgtggtatttacccagctcgttgtggtcagacaagtaatcttgtttttccctcctttttttttttttttgtttgtggctgtgttttcttggctttatttcccctttagcacagaactctgaaaaccctcttactgggccagctctaccaaccacaatttataaagtctatcaaaacagtctatgacaataaaacaaacactagtatgaatgtggtgtctgatttgtaaagcgatgcctggtttcaattttggcagccttcctgggctcttcccagccagtcgggctggggcagagcggtgagttcaggcggtgaccaggactgccatgcgtggcaggggaggatgctcaccctagtccgccgtccgttttcactcagtggagagacatcttttatttgccaagtagagattctgggccctgggggatgtgactctacctgccttcagtgtgccaggttgttgatctccactccaggaccccgcctgtagaagtatttacaggtttgatatcgagtgctttaaaggataggaagaagcaaagcgtgggctgctgagggggtaggagaaagaggggggagggaaagagcccaagtccggccagagctcctgtgctctggacaggcggatgcgggagggctgccggacgctttccactcggcccctggtgggcatctaagccactgaccccactctacgaggggtggacaaggggcagccccccgataccagggtcccggggatacgggagagagggatgagggagagaggttcccacacaggcgagagtccttagtccggtctgtggctggagcacaggaagaccttctgatgggaggttagacatggctcattaggagaaagcctatcccatcatccaagcacagtgggccttgatgaacagagacagtctatgattttagagctttattgtagaaaggcagggagaaaggagagaaggcagaaagagagagagggactggccatggccaagaatgagagaagggggaaaggagagagagagaagaagggctagagagtaagaaagtttagagagagcgaggtgaaagcttagagagtaagtgagggagagagtaagagggagagtagagtaagagagtgagaggagagagaataagagagaacgaggaaaggatgaggagagtgagaggagagagagagagaggtggggccaagcagcccctcttatagtgggctgttttatcttgttgttgctaggtgactgggaggagtttagcctgaaggtcagaagcttgggacattgcctacgtgactactagccacgattctcctgtgggggctgtgggggcagtaacttcgacaggagccagggttccaggagacgtgaggaaacgcctaccttcccatgtaggtgaattatcccccgggttcagacctcagctcgactggagaccagcctgtctatgcatagcccattgctccacagcaaagggctattggctgctttgtctgtccgtttatttatttaatctatatgggtgttttgtcttcatgtatgtctatgtgtgtctggtggcctcaaaggccggaagaaggagcaagagcccctagaactggagttctgagcagccctgtgagtgctaggagttgaaccggggacctctggaaggacagccagtgttttgaactgctgagccatctctccagcccctgtgcttgtttttcaaagctagactttaaactgtgaactgtgtgtatgtgtgtgcctgtgtgcacacacatgtgcgcacgaattgtgtctatgtatgcttgccctgcttgtatatacagaggctggtagattcctcactcgctttttttaattaatcattttattcatttacatttcaaatgatatcccgttggctaacaggcaggacttagaagaccacgccttgcagcaagggaggctagacctctgtcttctacctgaactgccatttgcttgtgattcttgatatacaacacctatctacctccccacgcccacatagatacacacatagatacacacatatatggatcaaggattaacacaagcctgaaaggtttaggtggtcaggattttattttcttaagttcacatgtagggaactagagacagcatggcagggagattgaaaagtggatttaagaggaagtgtcaggaatgttgatggctgcctgctgttttcagctagatttcatagattgagaacatttactcaaagccagaatgttcctcattttgagtggttgttttcttttttttgttcctcatggaactctgatcctttaggattctaatgttgattattagaaagaagcctagtttaagaaaagaaagaaggaaagaaagaaagaaagaaagaaagaaagaaggaaggaaggaaggaaaggaaggaaggaaagaaggaaggaaggaagaaagaaggaaagaaagaaagaaaggaagaaagaaagaaaggaaggaaggaggaagcctagagacaggcttgtatatacatctttaatcctagcactcaggagaagcctggtctatatagtgagttccaggacagtcagagctaagtctcaagtaaatagatagaaagataagtgaatagatagatagatagatagatagatagatagatagatagatagatagatgatagaataaaatttttaaaaaaagcctttcccctaaatttcaactgaagtgaaatagaaatcactggaaatcttagacaggttatagctgcctggagactttggagttgttatgtggatgaaatttctcctaggcttcctagttacaaaagaaggatcaagggggaagtttaaattccatttactgcctctttgcttttgtgttcaagaatatgtgtcctatgagagtttctcacaagcccagaaggtttgagtttgggtcactggcattctcaaatcgagatgttagtcatgtagtggttttccagtagaatcccgtcccccctttgccaccgtggttttgagaattgcaaccaacctcagtcatatttagtgtgtataaaagctgtcttcatgggaaatctggagtgagatccacagagatttcctacagagccaaagctttgtacttacttttctcttgctgtgataaaacatcatgaccaaggcaacttacagaagagagggtttgcttgggcttccagatcctgagaagcaggcattcatgatgggctgatttacagccgggaagcttggcagcatgctgcagacatggtagtgtgtaccagatgctgagagctcacagtgtgagtcataagtaacacacacacacacacacacacacacacacacacacacacggaggggtgagcatgcatgatgagaatggcaggaggctttgaagcccatctccagtgaaatacttcctctagcaaggttgtcccttccagaccaccacaaatagtgccaccaagtgttcaaatgcaggagactgtgggggacattcttatttaaaccacagaaccatcactgtcattcactcaacaaaggctgatggtggtgtgtgctcaatctcagggaagaaggcagagccaggagggttgcaattcagaactaaccagtaagtgatgccaggggtgagctttgatctgtgctgtgggtgtcccaggatggaagagaaaattctgagtgggcatcttggaagaaacagagttagaagcattcacccgagaggagggtattcatgacgggctaacttcagaggtttaatggagcttgtgttgctaaggggtgggttggctcgtgaattcgaggagagtggcaacctgtggaatggatgggaatatgtgtctgggggctgtgttttacaatagctgcatcttcagtgaccttggggcccttgcttaagacctcccagtgccttggctagaggttctgccttgatagccagaaggatggaccccaggatgtcttcaaaccagcctaagtgctaagagccacggatggacagaacagcctttttttgtttaataaattaaatatgataaagaaaatggagttggttggtggaagggtggtattagaagctggagagaatcatctatatcagagatgatctgatatggagtgcctgttgagcttgaagttcaaggtctagaggaagcccattctaggaagcatcctggttattaagaggctactccagttcttggtcttggccttttgggaataccaagtggtgatcacagcaatggctgtggtaaacaaaacaaaacaaaacaaaacaaaacaccaatttaaaatgccaagggtaagactcttccagaacacgaactcctctccatatgcccattcagccacacctctggtccaccctctcgagtggacagcttagtcattacgtcaccaagctaggagcctgaggatggtttaactcttgcccaccaactcttccctgactggcggccagctgtggattctgcctcctcacaaaacatccaagcaggatgttacccgatgaataaatggatggattagggttcttgtgtgtgctcttttatcatttccggcccattttgtttagttgttcttccaattgtctctcaaaatgaagtgcaggcatttctcaaaacaggctcccactaacgcttgcccacctgcctgtgtaatcaggaggccgtcttggatacacatggagtttatctgtacaccaggtatatgcacccagattgggcctggctcaccataggtgagcttttcaaggacccgtgacttttatttatgcccccagtggcaggcatgtggtaatacaacttgaagcacaaagttaatgagtgactaacccatatctatcctgaattatgtgtcacgttgtgtatgggcagggttttcatcgctatgatgaaacaccatgatcaaaagcaagttggagaggaaaaggtttctttggcttacatatgagtgttcgtcatggaagggagtcagggcaggaaattagaagtggctagaacctcgaggcaggagctgataggaaaaacacagcagagtgcttcttactccctatgttggcttgctccctatggcttgcttcacttgccttctatagaaaccaagaccacctgcccagggatggtcccacccacacggggctgggcctttgatcactaattaagaaaatgccctacaggtttgcctgtaggtccatcttagggaggcgtttttttctcaattgaggttcccatctcccagatgactctgccttgtgtcaagttgacataaaacaagtcagcacatgcggctagtcacttatcagaagcaagtcatgttgtacactcataagatttgttagggttgtgggtctccagtatagtctgtttccagagggcagctttctctctgtagccgtgagcctgttaggggcttttctctggtggcctctttccattgtcctcctcagtgtctgcagcggctggtctgacatcttggctgccctgggactcctactcatagagtatcacgaacagggctgggagactgtgaaagccatccttttgtgaggaggcggtgtttggtgatgtagaaagctctgctagttagtgtatggctggcattcttgttgctgtggacacagcaaagcaaaggcacgccacactcctccgttgagcccctgcatacccctcctcccctttaaaaatgcgtagcataatagaagacactttaaagttgggcttttacgaagactaataccgctgtcataaggcatttgctaaatcaaagcccaaggagacctttaaccactgcagaagcttcctcatttaaaccatgaaggttaaacaataaaaactaattttctattcccagagtacccattgcccttccaggaaaagcatcactcttctttatgaaaacaaggacgcatagctcctcgggcgggctctcggtgtagaaagtacatcagcagttgtagaacgtctcttctgctcactcctggaagaaatggtacccatgtggccgtcacggccaagttcttcaccaggagctttcaaagacgtccatggcattggctcagagagcaggaggaggtccgaccctcaggttcagtgggttagaaaccccttctgcctttgccctctccttcttttcctgagctgctggacttcatccctccctcatggggatggtgaggagttgtgttcattctgagagctctcccggggctaaggtgaggggcatctctggtgacagaagagggctctacagtcttagctttggggactcaaggactccacctaaggacctgcgccatcttaactaaggacaaataaccatctctctctgggtatgagctttagggtcagggagagccgagataaggattctaagtcctgctctggcaggggttgtacagcgacacggtagttgctcttccagttcttggaggtgaaaaagctttgtgcctaaagatgactcactgcaggtaccactagggcattctggctaggtacaagaccaaaccaggaacgatacaccttgcaagtcaatggggaaccaaaacagaaacaatattccttgcatgttaagggttctttttgcatttaaggcagttaaaaataagttcctgtttgtcctatgttaagcccttgcaaattaaggtttctatttgtaattaagaataggtttctgttgataagttatttctccgctggtcaaatgagccaattccagccagattagattatattaaagaaaggtttgttgggaagctactcttgggcgagttctctggcccctgggaaggaggccagggaagtcgccattggaagagagagaggagaggggggaactaaagagagaaagtgtgcatgaacagagagaaggggagagagagagagagagagagagagagagagagagagagagagagagagagagaagagagggaggagaacaaaatgtgtggattatatagagaagagcccctaagggaagggcagcccagcccctgggctggaaagttcacggttgggggcagagtatgccagctagggactgagggatgctgggagaacctggaggccaggtctgctttggtgtgtaagataagcatctcagtcccttgacccaggatctggaaccaagcacccatttcttaaatctgatgtaaactgcaaccccgtgtacgtgatgtatactgtaccctcgttccatccctatcattctttctaacaatgtatataatagccaactctcacccctgtgaacaccttacctcttcttaaaaaaaaaaaaaaaggaatttcatgaggccagcaggggctgctctcttgaatcctgagacttagggtgagtcatctggctgacgagttcgtggtgcatcccaaactacagcttgcttgctttaattggacaatcgtggatttggtcttttctcctcaagattctcaggtttagcaaaaggagcagcaggtatcaatggtgcccatgaatgggaagccaggttctggcacccggcaccatcagaagcagctccacacagtactgccggcatctacccacagtgctgccagcatccttgagggaggaggtggcccacaggggaggaagagctatgaagccaggcagtcagctcagttaacagcttattgctttctctacacccaaagacttcagatagcaagtgttccagttttccccttgaccaaaacagtttctaagtcttaagatgtggaaggacagtgggatacgccttgcaaaattcctatctcctaatcgtgtacttggttgctttggcaaccagctcccatcccttgagttatctcattggcatgaataggtctggttgaaaaaggtttatgaataacagaagatgctcctatcccccctctccctccctcccttcctccctccttctctctctctctccctctccctcttcctcctcgtcctcgtcctcctcgtcctcctcgtcctcgtcgtcctcctcctcctcctcctctttcttcttcttctctctgtctctctgtgtctctctgtctctctctctctccctcctcctcctccttctctctctctctctgtctctctctctgtctctctgtctctgtctgtctgtctgtctgtctgtctgtctctccctctatctatcttgcaatatcacagaggcccagtcgtgagggggccttataaaccttaggactgtacttgttcctgaagtcaccaagtgatttcaagaagaggagggacaagttccccttgtacttaagatgctttttcctgccaccatccatgcatctgtctgtggcacaaagactgtgagattaggtaggaagaggcaattgtcttcctgaggagtgatgggatcttgatgctgcagcctgggccgggaggaggagataggatttctgagctatttaccaagtagaagtccacaggacttcccagcaggagtgggaaatggactattcatttccagaaagagccgggagtgtggcattcaagtgctaactggctgatgaatgcactattcttgtaactaggttggagaagaattacatgaagggtatcattaagatgttaaaatgaatgcattacatatgttaacaagtgtatgaaccctgtattatatctggcaagcggggtgttaaatccttgttcaaccagccagatgtccctgcagctgctgtggtattgcagagggaggcagccacctgagacccttgctactgactgctgcgatagtgtctagtgtcgggagcatctggctgtacaaattgcttctcccgtgatttgattgacaggtaccaatggatcacgtgattcctatcacagtccaaatgggatttcagactgataaacccagactccaataacttgaccttttacatggaacctaggcagctgggacatatatttttattatttagaaggatggtatccagattgcagtcaaacaaacataaaaccaatttaatcttatatactcggggtcttgttcctagtagttagttatttggcagtttgtaaaggcggtttagaaattggttggaagtgttgaaatccctagagccagccaaggactttcaagtacaactcagagtttggtatttattcttaccagtgtggcctcccataagtgggcccaacttctcaagatgagcagctatttcctgggtttggaaaaaaaaaaccaacaaaaaaccaaccctcctaaatcatttaaaaggccatgcaggggtctgaagggagctaggtcctaggagactggatgctttcgctatcacactcctgggaaccacactcttttggatgtcctgtttaagaaaagtcgcacaaagtcaagaccacagttacacaattgatcttttgtatgccgtgctccctggaggagagattgtgaaatcccagcattttttcctatgagttaaactacagttgaaattaagaaaaaaaatcaaatcagttgttttcatgtctctgcagatgtactctgacagaaaagatgaaaaaaattaatgtaatctactttgacagagcactcagtgttgaaacttccccattggaaaacctgggactgtcaattgggacaatgtccactaggtggcactgtgtccgaacatttatccttgacttggctgcaattttggggggggatgcccactttattcactttcctcttttccttctgtcttgttccctttccttgttctgttaaaggaagctgttatagttttggcctaaattatgcttatctaaaaatgaatacatctttttgaaaagactacttgttacagtttgaccataaattcgttcattaattcatggtatttcttattagctctcacaaggttaaagattcttgttgtcctggatagtttatacaaatcaagataggtgtgtgtgtgtgtgtgtgtgtgtgtgtgtgtgtgtgtgcgcgcgcgagtgtgtgtgtttcgcaggtagctgtgttctgggaaggcagattgttgatcttctaagatagggaagtcaggtagaaaactgggttttctagagcaaaacttgatagtgggatctaggcaaggggggtggtagggagggaagaggactctgctctgttccacactctaagatctgtccaggcttctgggatgtttattctatgcgtttcatataattctaaaggatactacaagggaaaacttggttggctgaaaacataaggcgttactatgtttcaatgtgtgggatagaaatgtaactctttgagtggacctgactcatgaaaacactcatttagcaatcccgtttctcaaagcatgctgtgggttagagtccaccttacagcatctttggaaaatatcagtgcgatttgagaccaatggctgtgagttggaccagggcgactccaaagtttccactgaattgcagctgtgtcccccagccggaaagcatcaagttctacttagaagacatttatgtgtgcatgtgaaggggtgcacttgtgtatgggtgcgtgtgcgtatgtgtgtggaagccagaggccactttggggtattgttcttcagaagccacacacattggtttactaggacccgtccctcactggcttgaagagtgacgattagcctaggttggctgtccagagaattccaaatatgagcttgtcagtgctggggttatgcactgagcgctgagatgacctactgagtgctggacctacctaccaagtgttggtatgacccactgagggctgggatggcctactgagtgcataggttaactactgtgtgctgggatgacccactgagagtgaggattacgagagtgcaccaatgtctagtattccaggttctcttatttttaaaatccatcaaacaaacccccactggttccggggatctaactcgggtcttcttggttgcactacgccaactgagctatccttcagctaagattacgttttattcgtctcaaaacccaaagacagtttaaaatgatagatttactagaatggattgccctcaaatagccatttctttggggttcggaagattggggtagagacatacatgctgagtattgtgtctgtgtgaccagagctcacagagtcatcataagatccctttttggtattgaaacttcctttctgaatgtctgagaagaattacagttcttgggttctctagagatataacacaaaggcatcacctccctgggtctctaacgagcgctctaattcatcctgggacatgaaccctttcttcccctgacagcaggcattgaaagtgcttctgagaggtgctatttattgaattttcttgtaactaaatgggtctgtggcagctctgacctagaagccactgattaaatgggcaaggaaagtgcgttcacagtggagagggagaaaaagacccctgcccattaatctggggcttcagcctgctgcttggtctgggtctcaagctttaagatcatttcctcatttgcccatgtagaaatcctttcaaaggggatttgtcgatctcagtagagactgcagcagcagctgctagtgtgttagaaattcaagtcagagactccagcccaggcttcctggatctcagacgacctgatcctgcagctggcacctgcctgccctcctttaggtcagcatgcaccaccctcagttttgagtgtcactgccctggccacagtgacatttttcttgatttttttttctatgatgaggtgtgtgtgtctgtgtgcgtgcgtgcgtgcgtgcgtgcgtgcgtgcgtgcgtgcgtgcgtgcgtgcgtgtgtgtgtgtgtgtgtgtgtgtgaatcaagcaaaatcagaaaattccagaaattgggataccattgggaatcccaagaagagaactgtggactagaggtcagcaggggtggggaggaaaaggaaaccaactaagagccattgctttgtctaacgcaagaagccaccatctgcttaacattccctacagtgggcttcaggctgcacagggacccaggggtaggccaggacagaggctgaccttatgtgacctcagtggtatctctaagagttatgaaaaacagaatagattcttatcttctttggggttgtctgaaggcagagagaacaataaagaagaataaaatcttatctctcattgccaagaattgaattcatgtcattttacctacccatttattggtctgactataaggagtataaggctgaaagcctttctgtctacatagggaaagctcttgctacgtgatctattctttagaccttgtggggtagtaacagtcggcaggagtatttatcccattaagtgtgaactgggactccatcttgtgttggtagttccaggtatctgggtttactgggcactcgggctgggtgttcacctatattacctcatctaaccatcctgactggtctgctcttgaagccatgatctgaaccaaggcaagactagagcttcaacaggctctgccttatgggatattttgttagctaacgtctgaattgggtgggcacatggtcacttggtagaggcttcattctgggagcgcaggttaaatatgcagttatctactcctatgttcttatactcaatcgtcatctggcttatgcatctagacttgtttcctgcagtattttaattattggcattctaaaagcttttagactttcatatagtactttaaacacactgacttaaaaaaaaaaaaaaaactactgggagccaggtatcattctcttacttgtgggctgagcctctgcatcataatagaaactcactactgaattccatagaaagaggcccactggagtctgaagagaacaatatattttatatacacttcatttccatttatgtacctgttatatattaattatgctcagttgttttgttttataatttaactttgtttccttttattgcctcaaaggatttgtttggtggtggtggtggtggtggtgatgtgtgtgtgtgtgtgtgtgtgtgtgtgtgtgtgtgtgtgtgtgtgtcggactttttaagcattttgggagctcagatgctaggaatgtgcgatccaggaattctgttgcctctcagcttctggcttcattttaaagcatcctaactgattttgcatctggtagtcctgcgtaaatatatatatatatatatatttttttttttcccgctgctttacacaaagaatgagtttatgaatacagttctcctttatttcaggaactgcaacacattgtggggccacagcgcttctcaggagctccaggtaactatgagtaatttgaatgagtgtttgaagtcctgtatgggtggtagtctttaagctcatgaacttctgtcatccccagctatgatggaaggctcatggttggatgtggcccagcgaggcaagcctgaggcccagccatttgcacacctcaccatcaatgctgccagcatcccatcgggtaagttacatttccacccagcctgagaacattgtttcaatctttcattcttcggccagtggacttactcaaaccttctaaaccatgaggaggaggtaaacccttcagttgaaccctaccttgccaatcctgtcacatcatccctgtattcactctcagggacggaagtgggtgtttgagctcctgccggttggtgggtgtaattgctcacagttcccatccagtttccctctgaagtagacgaatttgatatcaaatggatcccccacttcctactttcttggtggatggctgcagtcaggaagccagagacatccccatttaggaaggctgtgtgggggctagcaggtgacagcagtcctctggaagctgagacattctgtcccctttccttatgcttatcttcccagaataagtatttactttattagaccagagacctagttacttttgaagatgaggacccagagctgtgtgcccgtagctacctcagtgtgctaggtagtcatcacagagccccactgactgctcactccgagctaggcaaagatgataaagattacagagagcatcatgggagagtgatcactgagcctcagtgttagcaccactgtggcctgcatgccacgcacctccagtggctgaggtgtttcagtgtgtgttcattccctctcagcctcactgcaaggtagcagttaccgttcagattgttcagctagtaccacagtgcttcacacagtttgccctttgtttgaggtccctgtggttacaggaggagaagctgacattcctctctacttaattcccagatcggtgccgtgcattatcctagacgcaggcacgtgtgctaggatggctttgtcagaaggcagttctccaagggtcacattacttttgctcgaagtagattagtttggaaaccagtgaccgggctctaatgtctccttgggcctgtgacctgcctgtgaccttgtatgaagtactgcaatctgcgcctcagtcttcataaccagggaggctctgtcctttttgtagggcggctatacatactatgtttcggggtggggagggaccatattacattcagtagatgtgatctaaaaattactatttgaacttaattaagtcattatgtaaattccactttgtttcataaatggcttaaggcagaattttctcctttttttctgagtttaaactttctgagtcttttaaataatacaaatctatcttttaataaatagttttgagccattattatagcataggccatagcgatatttttttcctgatgggagatgccgacggtgagaaatcacctcttgagctgtcaggagattctctaggctgcctgctctgatcctctggatagttacttccatagacagggtttctgtctgcgtgggcctggtggtgcttcactaattttctccgagtggggaaactagtttgcatgttcacaacggcaatcaaattaataccagtgtgcgggctgcgtgtgctgtgactgtaccctgcatttatcttttcagttcactttaaatggcataggataaatattgcctaagagcgtgtgccaaagtcggcttggcaaccgcaagcatgttttagttataaagctccctctgcaggcacctagaatctactcagcgccaaaacccaggcaaaactcctggttctgttccgatagctctttggtttaggatgcagggaaacgagccactctatgcttctgtttaagagaatagagttagttgttctgtttgggccaacagcccctctaaccccttgttctctcaatgctggccagtactgaatgattcagaggaagctggctctcacttgctatttttattttggagcactgttatatatttatttacacaggaggagacagaacctactgtacgtggactgttaccttaggaggttttaacgtttttagagtaaaatgcactcggaagttcttgggggtagggtcagaatatataatttttcttaggaagctgttgcaggctaaatgtttgctgaggtccctttccaacctctagcagctgggagcccagcagagagctgaggaggtcagccagactgggcgaagaggtcctcagcgtgcctcattagcaatagaagtcctggaaggcagggcagccctccgccctccgcacttccgtgttctcgactgttatctttggtgagtgcttttatccactctgtctagctttccagcctttcttctgcgggcttcgtgaactccccaatgcccagtagagtttctctcaccaagatgccccctctcttcgacattttggacgcaaagcttccggttttctagctcacctgtctgtcttctcaccaagctcagctctgctgagcatcaggagtctcttcagtttcgtttgggcagctccttgtcactgaagtcaaccctgttgttgacagcacgcagcaccggacaggccatctttatatgctcgctttccttacggtcagcggtaagcatcccgaggggctgctacttggggaaagtcttcattatggacgaagtgaattcttctgcactatgggaaaagtgggtgtccagaggaagcgccacatcaggtgtcccctgtcagatctccaggacgaaagaaggcttgagaacggggatggagaaaagcagagaggcatattatagcatagaggcttccactggactcgaagtggcacacgatcagggttcctgcctttcctcaccacgactgtgtattgcttttttgtcttccttggcagctcactccaatgtgagttagccaatcccatagaaagaagggacttcacactagtgatttaacttgtctctattaagagacacataaatagcaattgaatgaaatacaggacagagagaagctggggcaactatgggataatgtgagatggcaatatcttgaatttcatgagccttgcccatgggttaggtggctatctaccaggttggaggagttacaatgtcagcgcttatgtagtgagcaagcttttctattctcatcttgactcacttgggaccctagggtcatgtttgtatttggaacatttgactccagggagagctgggataggatctaccatggcaaaggagaacaattgctgcccagagcctgaaggctggtgactgtagcagccctgctgtgaagtctgagaacacacctgtcctctttggaagctggaactattgtttccttggtcatgtaatgatgggttgtcccactgtagaatgaaaactgcctcatctcctccctcccactttttctgttacctgttgttcagtctgctgtagcttgatttggaggtcctcagatcaccagatccaagagaccatagaccatctctggttcatcctctgactctctagagaaagatataggtgttcaagtcttcccaggaccaggccatagtattccttcccataaaccgtagcataggtggtattattgctgctgctgttgttgttgttaataaaaggatctccttggatccaccaaaccaaagagttgtcctttcatgagttggaatctagttcatggggtggtggcttcaatgtcagtctcagggctaaattatattatttaaaaataaactatatttattttaaaataaattatatttatttttaaataaattatatttattttaaaataaattatatttatttttaaataaattataaaattatttatgtattgttgtataaagcaataggtttcataatggcatgattgttcaaatatgtcatgtattttgatcttatttactttccatcgcactcagtcaccaatactgccctttctttttgcatgattgtggtgtgtaagtgtctcctagtttccatacatgagcaagaacttgtagttcttgtcttctttggtctccctgactgacttctgtcatttactatctcaagactaacaagttgaagacaacatggcacccaacatttttttttatgctactgaaacaaattatcctctgctctcattgtctgagacctgtctgtgttttgacttgctgacatcagagaggtggcagtgttagtttggtaaaaactcttcataaaatccctagggaaaagatgtggtttggacctttccagagtcctgtaaactctcacctatcagttatcatgtttgccagtagaataataaatatctgcattggtacacatatggaatagtttgatttattacagaggaatcaccaatttttttttaaaaaattattagatattttcttcatttacatttcaaaaacccagttatacacatcaaggacctgggctatgaacaccattgggcgcacagctgatttagaaggctctgtagaactttgacttctccaaaaacagtagcaaggaagccctttgtcatttcattttgtggaccagaaggggttgtaggagaacatggaacttgggagtgactttacaatgtgtgaatgcaattgcgtgatgctgaggagctgggaagcttggagcttggtggcttctggggatagtcaccgagtcatgtgacccaggctaaggtggggttaccagatagtgacacaattggaggttggtctccgcagagcttctgcaacccagattctcacatccctttacacaccccccaccacaaactaaataaaggttagctatacgaaggatggaaggaaggattctcttcctatacaagttggtttctttccaaggtgaagcgactctggtcattaccctctttcaactaggaatgaattgctcctgtccacggggcttaactttcttctttttatgctcggtagcacctacatggagtcagttttgatccttttctgtgggaataatttgcattctctccctctctccctctctctctgtatctctgtctctgtctcccccccccccataatcatagcaattctctgtattttccccaagctttgctgctttcctggaccatgttgctccatcactagtatcctatagcttaagggcaggatagaggatttttagttttgtgcctttacagtgcctgacagaatgcactaagtacatctgcatgcacccaggcccatatagaaaatgagtatcaaagtaagttattgtgttggaataaggattgttatgttagtgtatgatgctaccccaccagcctgtggaaataatgaggaacttttctcatccaagtagtggattctaaatcctgtgcctttgtttctctctaggttcccataaagtcactctgtcctcttggtaccacgatcgaggctgggccaagatctctaacatgacgttaagcaacggaaaactaagggttaaccaagatggcttctattacctgtacgccaacatttgctttcggcatcatgaaacatcgggaagcgtacctacagactatcttcagctgatggtgtatgtcgttaaaaccagcatcaaaatcccaagttctcataacctgatgaaaggagggagcacgaaaaactggtcgggcaattctgaattccacttttattccataaatgttgggggatttttcaagctccgagctggtgaagaaattagcattcaggtgtccaacccttccctgctggatccggatcaagatgcgacgtactttggggctttcaaagttcaggacatagactgagactcatttcgtggaacattagcatggatgtcctagatgtttggaaacttcttaaaaaatggatgatgtctatacatgtgtaagactactaagagacatggcccacggtgtatgaaactcacagccctctctcttgagcctgtacaggttgtgtatatgtaaagtccataggtgatgttagattcatggtgattacacaacggttttacaattttgtaatgatttcctagaattgaaccagattgggagaggtattccgatgcttatgaaaaacttacacgtgagctatggaagggggtcacagtctctgggtctaacccctggacatgtgccactgagaaccttgaaattaagaggatgccatgtcattgcaaagaaatgatagtgtgaagggttaagttcttttgaattgttacattgcgctgggacctgcaaataagttctttttttctaatgaggagagaaaaatatatgtatttttatataatgtctaaagttatatttcaggtgtaatgttttctgtgcaaagttttgtaaattatatttgtgctatagtatttgattcaaaatatttaaaaatgtctcactgttgacatatttaatgttttaaatgtacagatgtatttaactggtgcactttgtaattcccctgaaggtactcgtagctaagggggcagaatactgtttctggtgaccacatgtagtttatttctttattctttttaacttaatagagtcttcagacttgtcaaaactatgcaagcaaaataaataaataaaaataaaatgaataccttgaataataagtaggatgttggtcaccaggtgcctttcaaatttagaagctaattgactttaggagctgacatagccaaaaaggatacataataggctactgaaatctgtcaggagtatttatgcaattattgaacaggtgtctttttttacaagagctacaaattgtaaattttgtttcttttttttcccatagaaaatgtactatagtttatcagccaaaaaacaatccactttttaatttagtgaaagttattttattatactgtacaataaaagcattgtctctgaatgttaattttttggtacaaaaaataaatttgtacgaaaacctgcctggtgctttttgttcttgttcgctttcgtgtgggtcttgctctgcgatcctgttctttccaatatgataatgtggcttctatctttctccaaaggttactgggagaagtgcagatttaattaaaaactaggaacagattcaattaaattaatgaaccttggaatttgaaaaataatttgcaggggatttgtatgcaaggatgtagccagagagaaaacagacttttcactcaaaaaaggaaaagttttctctcctcaaatcatgagaaaaatatggtgctttgagctggggggaaattggggcttgctttcccttaccgtagtaaaggggggctcactttggcctggacatgtttcctcttggaaatcagtgtggatgagctgtctaaaccacgtcgattactcatgaagggcagagaccagaaaacagtcagcttgggaaggcacagcaagccattctctgagatactcgtcactggaagataaatgttttaggatgataacaacagcctagaatagagggagggatagcagatgttacagagaagaaaccgtaaattttaaacagcggagctatcacggtgggactcgatggtgttggccacatacacggactattttacatctgtcagtaaatctgagtctgaacagtgcaaaacgtgacttgggcactgtgtatcccgacagctgctgcttgtttcaaggaagaatttcgaggagcagccgagtttctgcagcttccgcagacatagaattttgttgcggcctcatgagctacccagcttagagcctgctccagcagtttcggctcgctcatttcatattactttgtgcagcgtcagtgatgtgctagttacagtcccaggcaccatggctacgaaggcaggtctcccagccccaggctcctgttctagcgctggttctgcttatgttagatgtggcaaggagcatgcgctgcttgatccaaatcttgggaatctcagagtctaaaatgaaaccgcaggaaatggaaagaaagtacaatgtgggcacagaatattcactattaatttttactgaggggtagcatgttagttatttttgaactgctgtgattaaaaatctaaagtgaacaccttaggggaagagaggtttattcaggctcaagattttagaggtttcgatcctccatgttggggagatggcggtgacagcggggcggtcaaggagcagaaagcatgcccatactgcaagtggctctgtccctcggtcctctcaggaaacgtccatgctgacatgctgtgccttcctgatcagtccagactagcagaccctcaacatcggctatccatcaagaataaccaacttgcactctcccaaagatgcaggggcaaagtgtcaggatcgcctgcggtgattcgtgggggctgtccaacatgtgaaagcaacatggcttcacatgatgccaagaagaacctccttggcagccctgggggattcagccacagtgtgatgtggaggataatgaacgctacgctatggcacctcaggtcggttgggggaggggagacaatgacttagtgacttatttagaaatcaaccagtgttttaaagtgggtaacggcagggatgggatatagtgagaggcaagaagccacctcgcttccggtcatgcctcagtttgccaggctcggagcagcatcttctaagtgggtttaaaatgcaggcgggaacacacagcacgtccctgcttccttctcttccttctgctttgctttcctgtgcatctctttcttgtgtctgccccctacgactgaaccctcccatcctccgcctgcccagactcccgtgtctcccatcgtcctactttgctttctgttgctatgacggaagccgcaacaaaagcagctagggaggaaagggtttatatggcctacatgtttcaattgcagtccatcggagagggaagtcggggcaggagcagaggcagaatctggaggcagacactgaggcagagtccacagtggagcactgcttactggctagcctgttttctgataccaccctggacctccatcccaggggtggcaccacccacagtgacctggaccttcctgcactaatcattaatcaagagaatgtcccacagacctacccagaggatgatccgatggaggtaaccctccagtggacgttccctcttcccacatatgtctaagtctgtgtcaggttgatacaatctggtcagcatactcatggtccttaggctgttgggtctccttgagatgaacgtatgtccctagagtatgtccctgccccgtcacagctgactcggtgggaggcatgacaaaacagtgtaggaaacctgtgtctagtggaagtaatggatctgagctgctggctccttttacctgcagcatgtcagccctcttaacctgccaagtctggggaaggagagcatgccaagtcccaggttatctgtcttcctgaatcaatttttacaaccacaccaggcccatgcatccaaaaactgacatgaagcgattcttactttagtgtgttagctttctccaaactgtctcgctttttgccattcatttgaaaaggaaaaaaaaaattgcaatggtattttgtctacagctataaaacaagcatccttttttactaataacgcacttatgggaattcttttgttcttttttaactttaaagatttactgtgtgtgagagggaatgagagagagagagagagagagagagagagagagagagagagagagaagacgaatgctctggaaccaaagggggccttctgatcccctggaactagagtcacaggccattgtgagcatctttacatgggtgctgggaagtaaattcagatctctgctaagtcacctctccagccctgtttttattttggtaacttgaaattctattcggggctcggtactacggcatcttaaacaacattccagttcttttgttttaattagagatggcctgagccaggagcgttggcatctgagcacagatgatgggcatcccagatcaagcaaagagcacaaatggcttctcttccagctttactcagaccgtcagtgtatcagatgctgcccgcccacactggggaagacagtcgtgactcagctgatcaattccagaaataccctcacagacacacccagaaatagtgttttcctgtctgtctgggagtcctatagttgttcagtggatctgcctcataaaactaactatcatgcgacattaaggactccgagtcacctgtaacataacttagaagaagtttgctattttagaaacccaaacgcgcttggacaatggcaattttacttctcaacttgatgggggttaccatggaaacaaatctctgatcatgcccctgagagagtatctagattaggtttgttgaagtcagactagacttgaatgtgggcagtacgattccctgggctgagttcatgcccaggtcggcagtacaggagtcattaggagcgtctggtccgtggggatgagatagaacagtgagattccatattaacccaggtttcacggctattagtaccagcatctgtttagctcagagcatgtaactcaggaggaagactggcagaatcatcaaaaatcatccagtcgctgaatgtctacccagacaacagagggcgccatgtgcctgtgagtcctgggctacccagacaccagggggcgccatgtgcctgtgagccttagacagagagataaagaagagcctttgcagggtgaattctcaaagtatccacgaagtcctgccttgaaactatgatgagctctgttgacctctgaatgggtatggctgctataacataacagacaaacttggtgggttagaactgcagaaatgcattcgctttacttctggattaagaggttgaaacaaaggcgtcggcggggccataacttggaaattctgagagccaattcttcacctctctggtttccaaggatccaaggagtttccagtaccagtcttgtttcaaattctgcctctgccccgtcttcacactttccatacctttgatttccagtcctccatctgagctctttattttattttatgtgtgggcaccagcatatcacaggtggagtacagaggtcagaggacaagttcttcggggagctgattttcaactcggtcctcgggcttcacacccgaggcctccacctagtgagccatcttaccagcctcatcttttctttcttataaaggaacagggcgtgacgtttagggcccaccctgacctcatcttcacatacagacttatgcctgcagtggctctttgactgaggaaagtcacattcacgagtcccagaattcataggctgtcgacatgtcttttactgggggcccttccacctactagactctccgaagcatcatgtctaaagtctcagcggctctgttgccagccactctcctctcctcccttttggggccttggcttgagggagggattgggaacgaagagactgtgattatgaaaataacaagcaaaatacagagcgatgcacatttctgtgtctgcaaatttctaaaaatgtggaggcaaaccccaggggaggttcacaaataccagcgtgtatctgtgttggagaggtgggattatgggtgttttcatcctgttgccacgctgttgttacaccgctattgaagtcggcagtaaggggcattaaacatcttttcaacataggaaagagactctggcttttggaacaatctaggttctgagcggtggccctgtgtgcttttgaagtggaatgcccaggggcttgggccgagcactggggagctggaatgtgaaggagccagctttttgagctggaagaagctctgattttgtttacagcctttgacttggattacattcctgattacaggctaaatatacctgtgggagtcgggctcagtcaccactgctgactgcatcactttctcccaagatttgccttccctctgtcttcctgattctaatgaagagattaggaagcaggatgcggttgaagaagggagagcagggccctgcatgcctcaagtgtctgtttaaggggctcagagttaatttttcaaagattactttgacagcttgttttctgccgtcaacagggagtaagcaagacagggacgaagataaattaattgaaatgttttcttagcatgtaactgtggcatggtgatttaatcaggtatgcatctttgtaagggattgttacaagaagctcagagttaaattgtatctttttggatgatacaagagagcttatggagaaagaattctttttttatagtagaaattattttgttgtacccaagttcctatcaacccaaagaagtctaacttggaagattatggtacttacagagcatctactggccttggaacagaggtaagcttatggcccgttagcactgtgagaattcagatgttctatcagtaaagtctgatgaaaggaagtaaactcctcagaattcactaaaggagcatgtagggacatactgatcaattggtggtagatctaagtggggattaatttaggggaattgccttatgtcaatatgggaggctgagaaattccactttcaaactttaaaattttttaaatttaaatgcaccatttatttatttataccccaaagactgcctctgattcctggtccctccctcacagagagcttctcgccataccccctccccttctccgctgagaggatagatttcctcctgggtataccccaaccctggcacattgtctctgccagattagcacatcctctcccactgaagccaaacaagacagccctgttgggttaggataccacagtcaggcttcagctttagggagagcctccactccagttgctgggagtagggggtgggcacatggaaacttagctacatgtgtgctgcatatgagccaggagttttgttccagcccatgtgtatgttctttggttgatggctcagtctctcccaggagtcccaggagagtcccaggagagtcccaggagaactcccaggagtccaggttagttgactttgatggtcttccagtagggttcctatcctcttcaggaccttcagcacttccctcaactcttttataagagtccctaacctctgtccaatgtttggctgtgggtatcttcatctgaagctgctgggcaaagcctctcagaagacagttatgctaggctcctgtctacaagcaacacagagtatcattaataatgtcagggattagcatatgcccgtaggatgggtttcaagttgggccggttattggttggccattccttcattctctactccatctttgtccctgcatttcttttagacagggcaaattttggcttggtgtccttatccttccactgagggtcttgactggctgtgttaggtggccacttcagattcatgtccccactgttaggcatctccactaaggtcacccacattttaaagctggggatgctgatagtactatttagttgaactcacaaggcctcaggattggggtggagggcatagataagagtcctacactctaaagaccaggtaaggtccagagttctgatatcagagggcaggggaggaagcggataccctagctgcaaaatggagagacttttggctctgtgtttgttctgttcagctttcagctgtttggatggtttccccattgtgagaggggaccctcctttcagtctcctttgaaaacactctcccagacatactcaaaataattcctcatcagcggcccacatgtgggcttcactctagtgcacatctaaaaaggaaccattgtaggcttaggctttcctctaaacctactttatttaggtttcttaaacatttcagcctcccttctagcccactgaccagaggtagaggtggggaaaaaatgaaggtttttaggaaaataaggatgtgaacctgtttagaagtagttctttgggggtgattccattctttgttgtcaggacacacaaatcattagcagcagctctgtccagcagaaactgcagggctccactaaatctgcatgagtcagcagaagatgcaagaattagccggaataccacaagacgctgtttggcatgtttttctctatgaactgaagaccagcaaagagttgtctggctagcaagcaaggaccagtgaagcattacgtggtgtagcaatgcaagaaagacctctccaatgtttgcagggttccatttatactcgttccgtacatcacacaccctctcacaagtctgcttcagccacatcctctcatgtgcctgtgcaatgaaagcagaggaactcattgtgtcttgttatttatttgtttgtttgtttatttatttatttatatttactttacaccctgagcccagtcccctccctcctctcttgtcagtcccacccttatatatcgctctccccattgcccctccctttctcgggaagccactcttgggtcccaccccaccctgtgactaggcacatcttcttccactgaggcccaaccaggcagtccagataggggaagaggaaccaatgggaagaaacagagactgaagactaaactacacatttgttacaagtgagtagggagtctagcatactccctggctggcaactcaggctctgtgtgcccccagggtcccaggtcattgtgtcttgtcaatgtttatagtcattgttcttattgttgttgttgttgttgttattattttagacaagatctcactatgtagctctggctgacctagaactctcaatatagatcaggctgacctcaaactttagacctgccagccccagcctcctgcatttaagtcacatatctttgcattcatcctattcatcgtctatagattattaaaatgagccatcttatgactgatatgccttggttttgtagggggctcagggaaagttttgtggtcataggagtccttagaaaatggactcactcagtgtcctggctctactgtatacagatcccgagttaatctagggctgacacatattttaaagtatccatttagtatctttttctgtgagcaaaggagagtgtagggggcactggtggcatcatttttgacaactccatttggctgacgggaacagtctaggtttggctcacacaggtgttcactgggatccacccagagagattaacagccacttttcattaggggaaaacactgcagagaactgtcatctgcctccctcaaatgtggaggactgctgggctgagagtgattgaggagaagcagacgttttactgattcactacatgcaggtcatagatgtgcttaaaatcaccgaagctgctccggccttgttccatggggtacaaaggctgatcagcaaatacaactgcaggctctcgatggccaggaactggtaagagcagagccttccttaactaggtttagcctttgtcttctacccttcccccttcaagttgctgaaagacctagtctcctccctttgcctcattgctcctctgaaaatgtgctatttgttgttgaagatgctatataagctggaattcaaaactcccttacttggaaaatacttattcaggctgggcatggtggcacacgactttagtacttagcatttgggaaggaggcagag

SEQ ID NO: 171 - DNA, 2218 bp, Mus musculus
cccacgtcccggggagccactgccaggacctctgtgaaccggtcggggcgggggccgcctggccgggagtctgctcggcggtgggtggccgaggaagggagagaacgatcgcggagcagggcgcccgaactccgggcgccgcgccatgcgccgggccagccgagactacggcaagtacctgcgcagctcggaggagatgggcagcggccccggcgtcccacacgagggtccgctgcaccccgcgccttctgcaccggctccggcgccgccacccgccgcctcccgctccatgttcctggccctcctggggctgggactgggccaggtggtctgcagcatcgctctgttcctgtactttcgagcgcagatggatcctaacagaatatcagaagacagcactcactgcttttatagaatcctgagactccatgaaaacgcaggtttgcaggactcgactctggagagtgaagacacactacctgactcctgcaggaggatgaaacaagcctttcagggggccgtgcagaaggaactgcaacacattgtggggccacagcgcttctcaggagctccagctatgatggaaggctcatggttggatgtggcccagcgaggcaagcctgaggcccagccatttgcacacctcaccatcaatgctgccagcatcccatcgggttcccataaagtcactctgtcctcttggtaccacgatcgaggctgggccaagatctctaacatgacgttaagcaacggaaaactaagggttaaccaagatggcttctattacctgtacgccaacatttgctttcggcatcatgaaacatcgggaagcgtacctacagactatcttcagctgatggtgtatgtcgttaaaaccagcatcaaaatcccaagttctcataacctgatgaaaggagggagcacgaaaaactggtcgggcaattctgaattccacttttattccataaatgttgggggatttttcaagctccgagctggtgaagaaattagcattcaggtgtccaacccttccctgctggatccggatcaagatgcgacgtactttggggctttcaaagttcaggacatagactgagactcatttcgtggaacattagcatggatgtcctagatgtttggaaacttcttaaaaaatggatgatgtctatacatgtgtaagactactaagagacatggcccacggtgtatgaaactcacagccctctctcttgagcctgtacaggttgtgtatatgtaaagtccataggtgatgttagattcatggtgattacacaacggttttacaattttgtaatgatttcctagaattgaaccagattgggagaggtattccgatgcttatgaaaaacttacacgtgagctatggaagggggtcacagtctctgggtctaacccctggacatgtgccactgagaaccttgaaattaagaggatgccatgtcattgcaaagaaatgatagtgtgaagggttaagttcttttgaattgttacattgcgctgggacctgcaaataagttctttttttctaatgaggagagaaaaatatatgtatttttatataatgtctaaagttatatttcaggtgtaatgttttctgtgcaaagttttgtaaattatatttgtgctatagtatttgattcaaaatatttaaaaatgtctcactgttgacatatttaatgttttaaatgtacagatgtatttaactggtgcactttgtaattcccctgaaggtactcgtagctaagggggcagaatactgtttctggtgaccacatgtagtttatttctttattctttttaacttaatagagtcttcagacttgtcaaaactatgcaagcaaaataaataaataaaaataaaatgaataccttgaataataagtaggatgttggtcaccaggtgcctttcaaatttagaagctaattgactttaggagctgacatagccaaaaaggatacataataggctactgaaatctgtcaggagtatttatgcaattattgaacaggtgtctttttttacaagagctacaaattgtaaattttgtttcttttttttcccatagaaaatgtactatagtttatcagccaaaaaacaatccactttttaatttagtgaaagttattttattatactgtacaataaaagcattgtctctgaatgttaattttttggtacaaaaaataaatttgtacg

SEQ ID NO: 172 - protein, 314 aa, Mus musculus
MRRASRDYGKYLRSSEEMGSGPGVFGPLHPAPSAPAPAPPPAASRSMFLALLGLGLGQVVCSIALFLYFRAQMDPNRISEDSTHCFYRILRLHENAGLQDSTLESEDTLPDSCRRMKQAFQGAVQKELQHIVGPQRFSGAPAMMEGSWLDVAQRGKPEAQPFAHLTINAASIPSGSHKVTLSSWYHDRGWAKISNMTLSNGKLRVNQDGFYYLYANICFRHHETSGSVPTDYLQLMVYVVKTSIKIPSSHNLMKGGSTKNWSGNSEFHFYSINVGGFFKLRAGEEISIQVSNPSLLDPDQDATYFGAFKVQDID

SEQ ID NO: 173 - DNA, 65274 bp, Homo sapiens
cttggagaccacaagtcaaaagtcaaggtgtttgcagagttgacttattcctaaagccatggggaaaatgatctgttccaggggctcctcttgacttgtgaatggctgtcatttccctgtgtcttcatattgtcttccctctgtatgtggctgtattcagattttctctttgtatcaggacagtcatcagattagatcccaacctaactacctaattttaacttaaatacctctataatgaccctgtcaccaaatatggtcacattctggggtactgagggcaaggacttcaacataggagggttttttgtggggtctagggggaagaggtgcaaaattcagcccattgacaaagcccatttatttcagcctatggtaaactctgacataggagtatctcctaatctttagtgcctgtaggtctgaggtcctcaatccttttcaccagtaggacagcagtggtaaaattcagccagcaaacattgcatgcaagacttcacttttatagcaagtactgaatgaaccatgtactcaatgccagcctagctggacctgctgtccttctaaatggagcaattgcagaaaaagcaaagttctatggtgaatccaaacagtctgaaaccatgaagctgggcagtctggctgtgtggtgcagcccattcattatggtgtgtcctgatcatgtttatttgtctaaactcttcttggtgttgccaaactgccctccttggacattaaacaacagaagagtgagaagccatgcagttgtagtcatctgtggctgcaggtctatggtgaggaggcccagccagactaatagggagatctgggacacagggagccatgctgtgtctcaccgggatggggccctacaagccccaggttccatggggcacagttttggtgtgactggtggggtccctagagccaacggccatctcctttatcatcagccaaaagttgttcaggttaaactgatggactggggggagggagatgggtgatgaggagagggaaacgctctcaagtcctttcctaaatgcctttttcctgccccagactgtggtaaaatagagcagagaccagctggccagccttgtttgtttaagttgttgactaatctctgagttcatgtgctgagctggttcatgaagttcttgaacttttattatccttggacttctgacacaatgagaatgaaataagaaactgctactatatttaaaagcagcctataagattgagtgaattaaatgtttgactttgaatccaaagattcaaggaattaaaaaaattgtataatattcactgagagctactctgtgccaggcacttatttgaaatataatgttttaaatgcaaaatgctaataagcaaatgtaaataagagattctagaaagtggatatagatttgcgctctccattgtggcagccacatttcaggtgtccatagccacacatggctaatggctgccatactggacagtacagatagagaacattctcatcactgcagaatgttctagtggatacagataatgaacaataaatatggacttatatagaatattttttgtttcaaaacattttgcaaactgcagtttatcacacctggaagggccagttaagactgctaatttgtatgtcaggactggaaataaccttaaagattactgagattaacgacccacccaatgattaatccactctacaacttccccaccaagcctctgtccaagttgggcttgaaaattccaacaatagacatttaccttcaaaggcactagattttatctgaactttctgtagtccaagatggttagtataattcagtacatggctcttagaaatgctaatttttctttgaaaatattaagaaattttatattcttataaatgcctttagagatgagtcatacaatttccataaaaattgtgtatagaaagggtaaatgtcaaatgtaagtgtaaatgtccaaaataaaatgaggttatgcagtctgcccacttgtcctgcggtgtccttaagtatgttaataataataataataaagagtttatcagcttaaggagattttgggctgagacaatggggttttctagatatacaatcatgtcatctgcaaacagggacaatttgacttcctcttttcctaattgaataccctttatttccttctcctgcctaattgccctggccagaacttccaacactatgttgaataggagtggtgagagagggcatccctgtcttgtgccagttttcaaagggaatgtttccagtttttgcccattcagtatgatattggctgtgggtttgtcatagatagctcttattattttgagatatgttccatcaatacctaatttattgagagcttttagcatgaaggttgttgaattttgtcaaaggccttttctgcatctattgagataatcatgtggtttttgtctttggttctgtttatatgctggattacatttattgatttgcttatgttgaaccagccttgcatcccagggatgaagcccactcgatcatggtggataagctttttgatgtgctgctggatttggtttgccagtattttattgaggatttttgcatcaatgttcatcaaggatattggtctaaaattctcttttttggttgtgtctctgcccggctttggtgtcaggatgatgctggcctcataaaatgagttagggaggattccctctttctctattgattgggatagtttcagaaggaatggtaccagttcctccttgtacctctggtagaatttggctgtgaatccatctggtcctggactctttttggttggtaagctattgattattgccacaatttcagatcctgttattggtctattcagagattcaacttctttctggtttagtcttgggagagtgtatgtgtcaaggaatttatccatttctcctagattttctagtttatttgcatagaggtgtttgtagtattctctgatggtagtttgtatttctgtgggatcggtggtgatatcccctttatcattttttattgtgtctatttgattcttctctgtttttttctttattagtcttgctagcggtctaacaattttgttgatactttcaaaaaaccagctcctggattcattaattttttgaaggattttttttgtctctatttccttcagttctgctctgattttagttatttcttgccttctgttagcttttgaatgtgtttgctcttgcttttctagttcttttaattgtgatgttagggtgtcaattttggatctttcctgctttctcttgtgggcatttagtgctataaatttccctctacacactgctttgaatgtgtcccagagattctggtatgttgtgtctttgttctcgttggtttcaaagaacatctttatttctgccttcatttcgttatgtagccagtagtcattcaggagcaggttgttcagtttccatgtagttgagcggttcagcaaagtctcaggatgcaaaatcagtgtacaaaaatcacaagcattcttatacaccaataacagacaaacagagagccaaatcttgagtgaactcccattcacaattgcttcaaagggaataaaatacttaggaatccaatttacaagggatgtgaaggacctcttcaaggagaactgcaaaccactgctcaatgaaataaaagaggatacaaacaaatggaagaacattccatgctcatgggtaggaagaatcgatatcgtgaaaatggccatactgcccaaggtaatttatagattcaatgccatccccatcaagctaccaatgactttcttcacagaattggaaaaaaactactttaaagttcatatggaaccaaaaaagagcctgccaagtcaatcctaagccaaaagaacaaagctggaggcatcacgctacctgacttcaaactgtactacaaggctacagtaaccaaaacagcatggtactggtaccaaaacagagatatagatcaatggaacagaacagagccctcagaaataacaccgcatatctacaactatctgatctttgacaaacctgagaaaaacaagcaatggggaaaggattccctatttaataaatggtgctgggaaaactggctagccatatgtacaaagctgaaactggatcccttccttacaccttatacaaaaattaattcaagatggattaaagacttaaacgttagatttaaaaccataaaaaccctagaagaaaacctacgtattaccattcaggacataggcatgggcaaggacttcatgtctaaaacaccaaaagcaatggcaacaaaagccaaaactgacaaatgggatctaattaaactaaagagcttctgcacagcaaaagaaactaccatcagagggaacaggcaacccacaaaatgggagaaaatttttgcaacctactcatctgacaaagggctaatatccagaatctacaatgaactcaaacaaatttacaagaaaaaagcaaacaaccccatcaaaaagtgggcaaaggatatgaacagacacttctcaaaagaagacatttatgcagccaaaagacacatgaaaaaatgctcatcatcactggccatcagagaaatgcaaatcaaaaccacaatgagataccatctcacaccagttagaatggcaatcattaaaaagtcaggaaacaacaggtgctggagaggatgtggagaaataggaacacttttacactgttggtgggactgtaaactagttcaaccattgtggaagtcagtgtggcgattcctcagggatctagaactggaaataccatttgacccagccatcccattactgggtatatacccaaaggactaaaaatcatgctgctataaagacacatgcacacttatgtttattgcggcactattcacaatagcaaagacttggaaccaatccaaacgtccaacaatgatacactggattaagaaaatgtggcacatatacaccatggaatactatgcagccataaaaaatgatgagttcatgtcctttgtagggacatggatgaaattggaaatcatcattctccgtaaactatcgcaaggacaaaaaaccaaacactgcatattctcactcataggtgggaattgaacaatgagaacacgtggacacaggaaggggaacatcacactctggggactgttgtgcggtggggggaagggggagggatagcattaggagatatacctaatgctaaatgacaagttaatgggtgcagcacgccaacatggcacatgtatacatatgtaactaacctgcacattgtgcacatgtaccctaaaacttaaagtataataataattaaaaaaagaaagaaaaaagaatattaaaaaaaagagcttaggcatattaacatgctaacagatgacttactatgaagaatgatcttacgtatttctcaataatttttttctcaaaaaaactttacaattgaagaataagtaaatgttctagataaaaaattaatcttaccttttataacatacaccttgagagaattataaccaatcacagtagaaatacttaaatattttcttttttttttttttttgagacagtgtattgctctgtcacccaggcaaggcacatctcggctcactgcaacctctgcctcctgggttcaagtgattctcctgcctcagcctcccgagtagctgagattacaggcacacaccaccacacctggctactttttgtatttttagtagagacggggtttcaccatgttagcaaggctggtcttgaactcctgacctaaagtgatccacctacctcggcctctcaaagtgctgggattacaggcgtgagctaccacgcccgaccatattttcatggaatgcctctacttgagtaaacagggtatgctgatgtactccgacttttcctcaaggtcttgccatggtcgacaccatgggcctgaatgggaccatcgcactgctaaggggaacctgctgggtgaggctgcagctgtcctattgcgtgttccttgtttcctgtgggattcttctggctcctccccagctttcacctatcatttctaatggccagtggctgtcctttactatagggaatgtccagccagtgcttcgatttttctctcttttcatatacactggatttattttcaaagataagagccagaatgattactcaagattcattatgctgccaccaaggaaagtgcatggactttgtgacagcgcttttccttggtgcctttcctcctacttacagggctgactgatgttgatggaaatctgactggctgaataatgatgctgtctagtagtcattttaacaacaacaacaaaagtataataatgaaaagaagaatggtgagaacaacatgcatatattaagcactgttctaaggatttggtatagattgattcatattatacttaaacaaccccataagcactgaatcagaccattgcaccacttaggtgtaccagcagtgggaccctgtaaccactcccattgagtgttttgtctttcaaatgatgaaactaaggcacagaaatatcacccagccagtaagtggcagatcctggaatgaatcacaggacatgtgggctcagagtccctctttttagccactttgttttaggatagatttctaaagctttcattctgtaatggagcatgaatatattcatgtgtaagacaatcacttatttctatccttttattttgcagggggtaactttggtaaaacctgtgtacagtttcatgagagggagcttgttataacagggagatacataagatccccagtcaggcagagctgatactgagaggtgacagcatgctggcagccctcgcagccctcgctctcggggcctcctcggccttggcacccactctggccgcgcttgaggagcccttcagcctgcgctgcactgtaggagctcctttctgggctggccaaggccagagccagctccctcagcttgcggggaggtgtggagggagaggcccgggcgggaaccagggctgcgctcggtgcttgccggccagcgcaagttccgggtgggagtgggctctgtgggcccgcactcggagcggccggcgggccccgcagccccgggcagtgacgggcttagcacctgggccagcagctgctgtgctcaatttctcgccgggccttagctgccttcccttggggcagggctcgggacctgcagcccgccatgcctgagcctcccccgacctccgtgggctcctgtgcagccggagcctccctgataagcgccgccccctgctccatggcacccagtcccgtcgaccacccaagggctgaggagtgcgggcacacggctcaggactggcaggtgggatccactgggtgaagccagctgggctcctcagcctggtggggacttggagaacctttatgtctagctaagggattgtaaatacaccaatcggcactctgtatctagctcaaggtttgtaaacacaccaatcagcacactgtgtctagctcagggtttgtgaatgcaccaatcgacactctgtatctagctactctggtggggacttggagaacctttgtgtccacactctgtatctagctaatctagtgagaaggtggagaacttttgtgtctagctcagggattgtaaacgcaccaatcagcaccctgtcaaaacggaccaatcagctttctgtaaaatggaccaatcgactctctgtaaaatgaaccaatcagcaggatgtgggtggggccagataagagaataaaagcaggctgccctggccaccagtggcaactcgctggggtctccttggtcactgtggaagctttgttctttacctcttggcagtaaatcttgctactgctctctctttgggtccacacggcttttatgagctgtaacactcagcgtgaaggtctgcagcttcactcctgaagccagcgagaccacgaacccaccgggaggaatgaacaactccagacgtgccgccttaagagctgtaacacttcttgtgagggtccgcagcttcattcttgaagtcagtgagaccaagaacccaccaattccggacacaatatgacattggttcaggcattcaatccttaagaaagctccatctggatatctcagtttttactctttttattctacctttcctggaaggctggcagtactttgtttgcaggtggtacatgtgtattgttgtagtgatgatatcttccccagtgggtatgtctgataggtgtttgttcagaaagatcatactgtatacatgtttgcatctgtattactgcttcgatgttttcagattcaggaggatccactgtattcaacaacactaataaagagcctactatgtgcaggaattttgctaggtgatgagagtacaaatgatgaataaaacattctgtattttcaagacttttataatctactagagaagacactcatatagttaaagtcactgtaatgaggaaagtgataggataaagtgaatgacaggctggacgcggtggctcacatctataattccagcaatttgggaggcgaagttgggcagattgcttgagaccaggagttcaagaccagcgtggccaacatgctgaaactctatctctactaaaaatacaaaaattagccgggcatggtcacacacacctgtagtctcagctactcgggaggctgaggcacaagaattgcttgagcctgggaggtggatgttgaagtgagccaagattgcaccactgcattccagcctgggtaatgtctcaaaaaagtgaaataaaacaaataaaaaataaaggtgagtgaggagcaagagaggaagggctcttagaaaattctgggaatttgggaacagcaagaaggcgatatcctctgggctgaggtttgaaggttgaagaaggttgtcaatgaaacaaacagaagcaggaaaggcttccccagcatctcagacctatgaatgtgaagtgagcttggccaacctgctcttcctccagagtgtttcatatcagcaagtggcaccaattcagttgccaaagagagaaacctgtgtggcatctttgactccttcctcttcttcaccatgtcatggctggttagtcaccaaacccaacagactccactcctaagtgcctctgagacccattgcttctctccaccccttctgccaccaccatgctcagtcctggcctggatgtggcccgtggtctagtgactggctctcttgagtccagacttgctctgcccacctctttctaccaccctccctgaaacctattctccacattgcagtcaaagcacattctaaattacacaacagacctgtcattttgctgagaaaaaaactttcaatgactctccattgcttccgaataaaattcaaatttttattgtgagtgacaaaagctttgtgactcaatccctgctcgttttctagtctcatttttcactattcttccttcccctctgatcaagctacactaaacttctttcagttccttgaatacatcctgttttgcttcttggctgttatatgtgtgtcttcccactttgcttggataactgactcatcccacaagcctcatcttaaatatggcttcctccaaaaagtcttttctggactcccaagtctaggttaagaactctcatgtgctcccaggacacattttactaattacattttatggtgactgcatttgcttgtgtatcagcatgttaaagtggaaactaaatcctaggttgcaaaaactcccatatttcaaagaaagatacttgtagagaaggaatctggaaaccaagttaaggatatacataattgaggttgaagtaatcaagccatagtttgtttagagaatctgtgagaggagctttgagataagcagtgggcgaggttgatatttgttgtgacgtttcaggtaacaaagagcctgggatttgtctcacatctaagaagactgaaagcaaatggtgtggccgaagctgcctctctggtggcatagctaagaccaagctgcacgcagtgaaaacacagtttgttttcactgacaacaaggcagaatgtgtaccagggatgtgacgtggggaaccaggaagaggacagtctgaggatcattattaaagggactccatccaagaaggtttccagccagaggcaagctgtagccagaagaaaagaatgagaggtactattagttgcagaaattgaggggagaactgtaaacagtcagctagggagagggagtttcagtcagatgtttccagtgggaaaatctttaagaaaatacaaaagagtaccatgaatgaaagagttcactctgaacattttaccaagctcagagagcaccaacccaggttataactttactagtcaaataagtcccctccagttccatcccacccacagcaggctccccttcccatggtaaagttttcagactgaaagttctgaattgaaggagggaagaagatttaacttgaaattgaatcaaagcttttgttattaacttgggcctcctcttttaatttttgaaatgagtgtgttctcaggactaaaagtgaccagaggactttttatcatttaagtaagaacaaagaagttaggctggatggggtggctcacacctgtaatcccagcgctttaggaggccaaggcgggtggattacttgaggtcaagagttcaagaccagccttgccaacatggtaaaaccttgtctctaccaaaattacaaaaattagctgggtgtggtggcggacacttgtcatcccagctactcgggggactgaagaagaagaatcacttgaacccaggaggcggaggttgcagtgagctgagattgcaccattgcactccagcctgggcaacagagcaaaaactccgtctcaaaaaaaaaaaaaaaggaagaaagaaattttgaaacctacctgagatttccagcctgagggaaaatatatggactacttgttggttttaaggtttttttctttgtctttgggtttcagcagtttgattatggtttggctaggtgtagatttctttgtacatacccactttgtgattttctgacattttgagtcaatgagttaatgtctttaatcagtttggaaagttctcaccataatatacttctatgttccttctgttgcattttttccctgtccttctggaactccaattacacatatattagaccttttgataatgtcccatgtatttctcatgttctcttctgtttaattttctaaatattgttcctctattttagacattttctattgaattggctttgaattcactattttttttattatccagtctgttattaagttaatctagttaattattaattttagatattttatttttttgttctagaatatccacatgcttatttttaaaaacattccacttctttgttgcagttctctatctcttcatccattttgtttacctttgcctctgttttctttactatatgtaaaagaattatttaaaaattattgtaggctgggcacggtggctcacacctgtaatcccagcactttgggaggccaaggcaggtggaccacctgaggtcaggagttcgagaccagcctgaccaatacggagaaacctcgtctctactaaaaacacaaaattagccgggcgtggtggcacatgactgcaatcccacctacttggtaggctgaggcaggagaattgcttgaatccagaaggtgaaggttgcggtgagccgagatcgcaccattgcacttcagcctgggcaacaagaatgaaactccatttcaaaaaaaaaaaaaaattcttgtctactatttccaatatttgggtcatctgttggtctgtttttaattggatattttttccctcttcattatgaaccatgcatttcagcttcttgtcatgtcatgtgattttgaaaattgtataccaagcattgtatataaaagaactaatgtagatattattttgcagctaaggtgaggacttcaatcagaaactgagctggattgcagctttaagtagtttcagtgcaactcttgtttcaaatatcttgaaggaaatattttttgtgttcttattttgttctctttctctgacaagtttctctcatacactagaagatctctctctaccttcccagcccagttcaccagccactttgccagtactcaacaaaatctgtgggggaagaagaccagtaattggagaaaatagttgggcatttgtagattttaatctgttacatcagctccagtaaaatatctctgcctacagcaaactcaacactacacctatctgtgtttatgcttgacaaatgttccaagggaggaaagggactgttaatctttcttatctagaaaagaatgttcatgtggaattccatccctttagatttttttcattatcagctcatcgataacttttaaaatatatatatatattttttttttctttagtttatctggtagctttgtctagttgttatggttatggtaatgccatggtctactgagatcttccatgtaataaataaagcagtttactgaatggttttaaactctcattgctgggaggaaataatatgctttttctctttgcatctattaggttctattttttcaatgttactacaacatttgccttagagtgtaagctttgtgggcacaacaattatctattttattcagcattatatctcttatgcctaccatagtaccagactcatggttggtatgcagtacatgtttgttgaatgactaaattatgagcatgaacaagggaatagaggtttgaaataaatagtatgatgtacaagaaaattacaagttattcttatgttctaaaactagaactttaagtgcaaggcagtgatggatgttgaggctaaagacagagatgggaaaaaattaagagtttgtaaagagcctggactttatcttaagtgttggtaggctgctgagtggtttcaagaggggaagttatacatccagttgttcgtgataaatggatcaatctggaagatgggtttaagtgagaggagactgctggaaggaggatgaaagggaagccattttagtacttaggcaggaaatgatgagaggctcatttacagacaagaaggaaggaaaaagcactctgggaatatggcagcacaggcttatttcttgacaccctcccactcccatctcaataacacagagagtatgtggggatgggaagtctacctgaggctttaggacctaaggagacagtataggaatagaagagcacgggccaacttctggacaaaattatttacagcaatgagcagacctaagtattagtagatttggggaagtctgaaaacagaattaatcccatagcttcttgggagactataatcacttggccaggtaatcccatgcatcctgacagacatatggaatctacttgaaatttccagccatgagagatccccagtccttcttatgctgccatcctggtgaggaagcatcttccctacccctcacttcatggatgtctaccattgcctaagacccttctaataatctgacatatccagaagcaatggggactgacaccaatggacattggtaggaaaagaagggtcaggtatcacccaaagggtctcaggagcttgaaagagggacttgaatcaaataaactcagcagcttgtttacagagaaagtttggtaaagaaacagaggtgaatttataaatgattgtaagaagaattattgaggaggtacaagaagctattgtgaaagatcaattgaagggaaaaaaggatttcttgaaataaaatttaattttggactttaaaatccaacagatcacctgaataatagaacagaaactgctgaaatattgaacacagatctagatcaaatgaaggaacatattcaggatgaagcataaataaaggccaggcgtggtggctcatgcctggaatctcagctctttgggaggccgaggtaagcagatacttgaggtaaggagttcaagaccagtctgggcaacataggaaaactccatctctagtaaaaatacaaaaattagccaggcatggtggtacatgcctgtaatcccagctactcaggtggctgaggcaggggaattgcttgaaccggggggcagaggttgcagtgagctgagattgcaccactgcactctagccttggtgacagagaaggactctgtctcaaaaaataaataaataaataaataaataaaatgaaactgcaagttaaacaatgtattatagaagacctaatatggcaaaaataagagtttcaaagaagaaacaataaaaaattattttctgaggaaaactgaagtggagacagattcaggaaacatttaggaaatgaatacaataagaccctttgatattatttaattatgttttcagaaacagctacaatctccctaattaatttttgtatttcccaaaagtttatttaaaagctctaatactttagattaattttattttaggaataagtctgagataatattaatgaattaaaaacctgtcaaacagagttgctttctagaaagtaagagataaaattactctaaatatttctagcattgtgcacagaagagataaacagttatggacaggtttacttccttcatacatgaccaagatgtttttcctcttccacctcccatccagttttccgtaatgtctgataatttgccattagaaatgcactcctttaggggtgagagctaaaccaaaccaaccaaataggccctgtttggccaggaggacctcagagaaaccttaaaataataataattaaaaaaacccacctgagttcccaaccatgatgggatggtaggtcagatgcctcattatatccctttctttttgctgtttagacacaacagctgacagcattaatgttaaaacagagatcataagactgacagaatagactgtttatggcaataagataccaaattgtaaacaagagctatggccatgccaggcaagggttaagtcacacactttacacttaacaaataaacgatgttctaattcccacagggtttcttctccctctttctccagcagctaaacaacactagctttgagataagtgatgttgaagcagttgcagctccccagctatcagacaccaaataactgagcccccacctgttacacaagccacagtgacagctttgattggacaagagagtgatttctgtaactttctcctgataagagaccaccaaccatggactacttctggctggttttacagcagatgcacatttgagtgacttcctgtcccttcttcacctaattgtgtacatttaaatgttaaatctccatcccaatggaactgtgggacgcacgtaacatgcatgtttgcttatcatgcatgcttacaccctttcatgaatattcatagctcttcctatgtcctgttgaatatgtatgctttgccaaccccttcagcttaaattcctgtgttactcttccctctgttgaagggcttgctttaggttttttccagtggcaggctgcccttcctgcctgcaggttgtaattccattcttaagaaataaaactcacctttctaaatttattaattgtgtgatttaagttaagggggtaaggcagtatatttccagaagactgccaacataaaattttaattcaattgtccattgacacagtgaatgttaatttgtcatcacatactagttaatttgttagctgaagggaatgtaataagaccaagttgcttgtaaagggtaatgggtaagctggattagattattagggaggccggtcctaggtgagaagtttcattaggttttcagtgagcagcatatgagcctggaccggagatcagaagacgcgggaacagacagaaaaagaagaagagtgatcaaaggagaggtggcaagtacaaaagacaaagcccaccagtttcataaagttgctcaggctgaccccatttccagggtgagatattttcacagacttattacctatgattatacacattttaaaaattgttattagcatgaggggctgcatatatattttataatagccacacttataaattagttgcaactggcttcagatttagcaagtatcttatacagggtcctggcaggaaataggtggcaaatccaaggggtttaactgaaaagactttaatttgaagagttgaggtcagggttaagcaaactaagaagggatggtaaggaacccaggggccagcaaaagtgggttcgctttcccacactgcagtaggttaacgccctccgccacgaaggaatccatatcctaagccccagactccgtgactatgttacctcacatggcaaaacttactttgcatatgtaatcaagttaaggatctggagatgcagagatgatcctggatagtctgggtgggcccaatgtaatcacaagggttcttatcataagagggagatattagctgggcacggtggctcacgcctgtaatcccagcactttgtgaggccgaggtgggtggatcatgaggtcgggagatcgagaccatcctggctaacacggtgaaaccccatctctactaaaaatacaaaaaattagccgggcatggtggcggtcacctgtagtcccagctacttgggaggctgaggcaggagaatggcgtgaacccaggaggaggagcttgcagtgagccgagattgcgccactgcactccagcctgggctacagagcaacactctgtctcaaaaaaaaaaaaaagaaaagaaaagaaaagaaaagagaaagagagagagagattagagttagagtcagagagaagctgtgaggacagaatcagaggtcagagactggagtgatgaggtttggagatgaaggaaccaaggaatttaggtgacttctagaagatggatcctctccggagttcagcaaagtgaaacgtctgtcataataataacgaatgacttcctttttcattttcattcatatagtgaagttttctaaaggctgcatcatgtgcaatattgtaacagagtaagtgcaggactgaatgtgactctatcaggccaattgtagagatgtgaaaaaatgtaaaacagtggcacttttctccctacttttttttgaaaatctgtttttttaaataaaataattttataaaagtattatgaattatttataaaattatattaacattatgttaacatgctaatatggtaaaattttctgcttggagtttgaatacaccaaatatttataaatataactcacacaaataaaacctctttggtgttctcaaaattttgaagaatgtaaaaggtttgaaaattgctgatctagcaaatgactgaacatgaacagctatagtatttgtacctgcccagcagtgcagcaattccttatccttctcatatctgcactttaattttcctttgacaaatatctctccctcctctcagcccatgacatgaggttcacatggggttaacttaattccctggctcaaaggaaaggtattaaattcagacttgtatccaaccattcctgaagctagacttagccctatttttcaataacatgaaccaatcaattttcacatgagtccaaaataattctatgttaatacactaaggtactaggaaatatagtttgagaaatgttgatccaaacattgtgttatttacagtggagtattgacataaactttgaatcttcaaatatgttctggtgtcttggcatctcttaatacctattagcttacaaggctttcactcaactattttataattttgataatgacttaattgattagttgatatattgttaaaataaatatattaatgaatttatgataaataaggcagataaataagacatgcaattaggaagacatgttaaacaaattgttataataatacaatcactctcagcttaggatagctcctggccactttctctctgggtggtttttactctgggagtagtttaaatcattatctagtagtagtttaaagcattatctttgcctaagagctttcgctgactccccacatttgcattgtactaagagttttctctgactccccacataggtctagaccctagtattataagattctcattgtacttgcactttgccttcaaagtactaatcacggttttgttagtgatttgtgtgatgatttgttgaatctttttttttttcccactagggtgtaagccccatgttccatcttgatcaccatgtttctagcccagtgctggcatatagtgggttctcactaatatatctgtagagtaaatgaagaaatgcatgagtgacatgacaggagaatttaaggatgccatgggagcataaaacagagggagccacctgggtgaggagagctgagaaagacttctggagaggcgacatttgagctgagaaaggaaagacaagtgggagagtcctccaggtgtagaagttggagagatgagcgctccagttaggtagtatttgaagctgatgtagaaaaggagtcttgagccagcttgtgaaggactattggagagttttatttttatttttatcttttttttaatttttgagacagaatcttgctttgtctcccaggctggagtgcagtggcatgattgtagcttactgcagcttcgacctcctgggctcaaacaatccacctatctcagccttctgagtaactgggaccagagatgtgcaccaaaatgcctggctaatttgttcattttttgtaaagatagggtctccctatgttccccaggctattctccatctcctgggctccagtgatcctcacgcctcggccacccaaagtgctgggattatagaagtgaaccactgcgcctggcctattgaaggtttttaatcttcagagtttcgactttatcaacaacacttagaagccaccaaagaattgcaggtatggaaatgacatatacttttgcttttagaagaaaatcctgatcagtgtgcacagaattcttcagggggcaagtgtgattcattctgataagatatagcatggcttagactgggagactggcagaggctttgaagatttctttgctcaaattttattcagcaagtatttaccatgcacctactatagcaggcaacatttttaggaaatggtgaatgttacagaggtgaataatacagcaagagtcgttgaacatatggagtttatctattagttggggagtgaatgttgacaaaggaataagtaaatacataggcaagaaagatacattacctgtgaaacagcagcaggtagactgacagtggagtatctaatacagcctatggaagccagaagatagtgggatgacatttttggagtactagtagaaatgtcatatgaagaactctgtaggaatgtaacatacggtcccatatatgaagctcctgggtcaagtatacctgaacataattcagggatttgagggactttcttgtaacctgaggatcaagatgtcaaggaattaaaaacatgtataaaacattgttgtataaaaacccattaaaaagaatggaagacactatagtaaaatcattgtgggtttagttgttataacacattttaaaaatctttgatcccaatcaatatttataagaaagaagaaatatggaattatttcctgagtcaaggagcagggagagaatgaggaagaagaggaggaggaggagggggaggaggagacaataaacctacttcccaaagttaacaaacaaaaagtgggaagaggtcaaagactacaaggagtagaattaacgtcaattgtttctatgtttgagtctgaaaattttttgtcccttctccaccaacctatatattgatacacatataaatgctaaaggcatttttgaatttgaacagatcattttctttgtatggctgcctttaaaaaaaattcaacctggtcactcttcctcaacatttactgaggtctaagtgttcaatttagaacacatgctttaataactcagagacctgtcatttgtcacaaatcttgcctagagaaatactcattagcgaattaggcagaaagaggatgcaaaataaaaaggcacagtagtcccctgatatccatggaagactggttccaggacaccaccaaacccctccccgcaaataccaaaatccatggatgttcaagtttcttaacatatcatggcatagtatttgcatttaacctacacacatcctcttgtacacttgaaattatctttagattatttataatacttaatagaatgtaaatgctatgtaactagttgtgtatcatttaggaaatgatcacaagaaaaaaagtctacagatgttagtccagacacagccatcctttttttttttttcaaatatttttgatctgtggttcattgcatccacagatgtggaacccatggatactgtgggctaactgtattaataaaaaagtggaaacatcctaagtttcatgggtgtttaaattggtcagcaacttccttctgaagaagtatcagaatttgtgagcaatgttaatatttttgttttctcactaagagccacagttctgaatagaggtttttaaaaagccctagcaaggtttctttagcaatgaaactaacatttaactgtatcatcagcttcgtgttacatctctttcctgactgttgggtgagccctcctcggatgcttgcttctggctacacgcccctttacccttttctctgcactgttttcatctttataaagtcagagttggtgtctataggctctctactgccacattcaagacctgcctcgctcaatgtcaccttcaagatgcagaaatagggatttgggaaggggattgtgaaattttcgaagtcttccaaaatactttgagaaactatatttggaagcactttggggggagaggttggacaggaagggtcttcagagatcatcaaatttaactttctaaatcctaaggaggaaaccgagactccaggatgtgaagtcccttctctaccaaactagaatggatgcaggaggaatgtctgaggtgcaatccttatcctttagcaaaggtgtcctctgcgtcttctttaacccatctcttggacctccagaaagacagctgaggatggcaaggggagtctggaaccactggagtagcccccagcctcctccttggagggcccccatgaaggaggcccttcagtgacagagattgagagagagggagggcgaaaggaaggaaggggagccagaggtgggagtggaagaggcagcctcgcctggggctgattggctcccgaggccagggctctccaagcggtttataagagttggggctgccgggcgccctgcccgctcgcccgcgcgccccaggagccaaagccgggctccaagtcggcgccccacgtcgaggctccgccgcagcctccggagttggccgcagacaagaaggggagggagcgggagagggaggagagctccgaagcgagagggccgagcgccatgcgccgcgccagcagagactacaccaagtacctgcgtggctcggaggagatgggcggcggccccggagccccgcacgagggccccctgcacgccccgccgccgcctgcgccgcaccagccccctgccgcctcccgctccatgttcgtggccctcctggggctggggctgggccaggttgtctgcagcgtcgccctgttcttctatttcagagcgcaggtgagtggccaccttcccaggggatcgcggctgagagcgcccatctccttcccccgcacttggaaactgagtctggcggcagggctgggccacccagagcttgcatattccggaagggaaagtgactccagaagggagagaggaagtgttgagtttggggacaacctggcgcagggctgtcgggcgcaccctgctctctctccgcccacgcaccccagcttctcggtgctctgggggcggactcccctggccggacgatgggtttgaatctcaccccgtcccttcgctgggaaacaacactggcctctcaccttttctggtagtgattgcatactttttctccctgtcatttctcacttgaagttaagaatcaacttctgttcacgtaggaaaaaagatgagcgccttcacttgggcatctacctttcccttcccgcccaccacccggcgggtttcggttcctgcgcctggctgctctgcaggtgtgctggggccacggtgctggagggctgcgcggagcgggaggtcgcggtgctcgtgcccaggtcgcccaatgggtgggcagaatgacacggcgcgaccagagaggcgcgggctcgggatgggggctctgcggctgtggcgctgtcctgtgggggtgaaggaagagggacagccccacgtgcctgctagggatgtgggcggaggaaggaagcgaggtgagtgtgatggcacagtgttactacagtctagcaaataaccaaccttcggaaagatgaagaggttttttgcacgacggctaggaactgcagagagatagtaggaaggaaggggtaaatttgtaatattatgctttctggtggtttatgctcttgtgttttcttggaaattgcagtgcagttggttggattcattcaaatattcttgtctggtgctgtgaactctttctcagaggaagtggggggctgactgtgcatttttttttatgggaaaagaaagttgggtttggactacattcgttttcagattcaaaggtgattactaaaccaaacgggatgcatcaaaacatggcattgcttggattgtatggttttttgacatgtgccaatgtctcgaactccattacttttaatcataggctttttgttaagtattcattatccgctagtttgcattttctagaactagtgtgattacctacttaaagtagaaatgcaatgagccacacttcagaaaatctgcattaaatataatctactcattgagagttttgttgtttctaaaaagacaacttttgagtggtttgcttgcaacacagataacaaatctatatgaaagtgactaaacgtctttctttcattggagtgtgttgcaataagaatggcttacccattttctcatccagcattttgttaataacccccatttagtgcttgtgcatggagtgccagcgttgtgcgtggcaccgtcacctgcgatggaatgagttaagaatcatttattcaacagacagtgtccacttactatgggcatggagccagatagcagagtggcctaataaaaccattaaaattcttagtcaaacaaaagagcaacaatcagaaaagggatcaaagatgcagtagttctccactgtttatcttttctaacaccttcgggatatggcattttcattgccataatagtgaagagagtgtccaatgttgaacgagcagtaggaaatgaaggagttctaggaaccatgaacagcttggcttggcaggagctgtggaaatcggtggcatggctgtgtaggaaagagtgacctgctgggctcttgttagagttgttcagcttttccctaggaattctcggtggtccccgtgggtgaggagtcagggctttcagtgatctcccatcatcctttagcagtcttgatgctgtatggatgatagtgaaacattcagaaccccttttcaaagtaaacgtgtgagttagtaagtctagccagaaaatattcctttgaagaagttaatgtcatcagacttctgggtacggttttcttaaataccatgaaaattcggttcctttgacttgtgcaaaataatttagctattattctgaacccaattttgtattgcattttaaaaaggctatctccttcagtaaagaaaaaatattaggaacaatgtgttcatatgaatataccactagatcgggatgcattttactggatattgtgtctacaattgttacccaaaggagtcctaatcattttgagatacattctgaaatatttacagataaaactgctttggtgtctggaatttgtttcaaaataatttctggttgcttacagatgaaaaaagatttgccatacattggtaatagctgaagcgctgatgcgtgcctaggggttcactctgtaattctttccccttttatgtgtgttagagatcttctttcaaagtcttagctaagagaatagtctccatttgacttgccgctgatttaacattttcacttatatcggctcttttggattggaacttggtaccaaataaatcagtagttttttgattcccactaaagttgtgaatcaactatctgaggtttctaaatgcatttgaatgagaacaaactatctagtaacatgtttgtagtttacagttaaaaatgacgaattagttttattgtttttgtttaaaggtggagaaaagaaggtatgcaagtcctcaaggaaaagcagtttgagtttttaaatgcatttaaaagaatgcccagaatagtgtaaaaattacggtgacggttaaaaagttttgttttcttaaatgtttgaatagataaaattgaatcagcctcctaaatgtttgcagattgcatgtgcctagatgtaaaaaatacatatctactagatccggtgtagcttggcttttcccccaccaccctgccaaagagaaaatagtgtgtggcttctgctatatatttaccacatagtattcatactttggtttacaaagaaaaaaaataaaaaccctttcaaaaagttgctctgtgtgtgtgtgtgcatgtgtatgtgtctttaacatccatataaccatattcaaagcttagggtttagctataaagataaacttttcagaaaactgaagatgttttgcccttttaacttcttccctcgatcccccaatatgcacaaaccaacctccctggttgtttgttacccaggacagcagtcactactgaaaatctgatgtagaggtgtgcactgcctgtttgaaaacacagataacgaagtagcacaaacgtcaagcatcctgcctcatttaaccctacaaatgattaagtttcaaggaagttaaaaaaaatgagacagtgtatttcgtaggcacattatctgacaaatgcattttaacagtccattttaagtcagatattcaagatttacttaatgttttcagacgtgtctaagtacaatgaattcattggttactcagtttactgtgacttttggttgaatttctgtgttcctcaatgaagtgtaagttccatgaagacagggactgcttgctttgcacaccaccttattcatagcatctagcccagtgcctggcatgtctaatttactgcaaagtcttttctaatgatttgcaacactacagatatgcccatttctgattgtaatatgcaaattatcagattagtggctaaaatagtatcatttttcaatcatgcaatcctccaaccagactaatgtgtgctagtaggtaggttgttgggtaggcgatacattcgttcagtcagttcgtgggcatttgctgagggtccagcatcagtctggctccctccctgctctgcagttccttcagcttagaggccctcatttacctgtgtgtgtggctggccttgcaccctgaacctctcctcctccgttttctcctagtctccattttcaggaaaggagagctgcaagggcattggaatgagaaagacatgtggttgtaggttaaaaataaatttctaatgtgtgatccttgagtaaacaaaataaatgagtatattaaaagcaattattccatgcattcttgatttcttttgggaaaaaacagtggatggggttttatacatattttagctataatgctgccttccaaaacagtggttctcaactgcacattgaaagtatttgggaagaggttcaatgattggacacttcccttagggatgttgatgaaattggccagtgaggggtggggtaggaatgagatggtatctgggtgtgggcatttttttaagagaaaggggacaaaatctttgcattgtacttatttgcatcaaatcagtaaccattattaactgtttcagtatctttgtactaattgatgttacttgtgaaacaattttaaaattggtgtcagggaactttggaatcgtttcaatagcagaaaatctatattttaaagcatgacttctcaaactttaatgtgtataagaatcacctgggatctagttaaaatgcatattctcaggcagtatgccaaggtaaagcctgaaattctacatttctagcaagccctcagggagcccacgatgctactcattggactaccctgagtatcaagaatatagggttcgggtgcagtggctcatgcctgtaatcccagcactttgggaggccaaggagggaggattgcttaagcccaagagttcaagacaagcctgggcaacacagcgagaccccatctctaccaagaaaaaaaaaggaagaaattagccaattagccaagcatggtggcctgcacctgtagtcccagctacatggaaggctaaggaaggaggattgcttgagcccagggatttcaaggctgaagtgagctatgattatgccactgcactccagcctgggtgggggtgacaaagcaagaccctgtcttcaaaaaaaaaaaaaaaaggaaaagaaaaagagaaagaaaaataataaaggggactgctgcttctcttagacagctcttagcttgtcagcaggactccagcttaacctagggtccccaggcatttccccactaaggccacattattcctttggctcagcagttttctggtggtgcgtcagttcaggcctttgcatgattcttctttcctgaggtctaaacccagtgacccttcatatcagttgcctggacttttctggtcttgtgggatacacaccggcataagtaagcccttttttttttttttttttttttgcaaagtgtctgattgaaaactttccttgtataaaaattcacatattatgacttgtattaattattctaaagaatataggaaaaatacagattgtacacagttttgcttcacggtggtatctcttccatgatgattataggtagtccttatatgtgcaagactggaataataaaatttgtattagtgagtgtacatttgttaaaaggctgtcatttcattttgagaatctcagatatggataggctctttttagtttatttctaatggttggttaataaactaacacatcattctgattaatttttaaaagagagaaagagacttgtcattaatttgactgagctttgtaatctcacgtagcttttctttttcgcttagtttgtacatgctaataagaaaatgcaggtgaagtaccttgaatatttaacaaacaaagaggacaagttaaattctcattattaaaacagatgatagctaattattgttaccctttacttcacagttgaaaccaccacaaaggcttggaaggagcaggcagacaattttaaagagtagtgattaaagatattctaatgctggacacctattcttaacaggcaatcagctaattactcaatgggtatattttgggtgggacaattccttacattacaggaatcttagcatccctccagcacacgtctgtaatatctgttcatgcagcctccccaccctaacgtgatgacaccaaatatcacctgcatccattcccaaacacccgctgacaggtataccattccagcttgagaaacactgatgagagggtcaacaaaaaagacagatgacacgtctgacttcaagttttgtttggaggtaaaaaagtggatttttctctcccttctttggctgattaaggaaaaaaggccaggccaacatggtggttaaagatgatgttgatttcgcctgttttatataggtttcatgctctgaatttcaaagtgggcctcataatcccatctagcatgttgcatatagttgatttaaagacaaaaagcttcctctgccttcagtgaccacatgtgatttccttggtgcccctcccctctatgaacactttcatgttgttagacaagtttgacaatttcccccatgaatcacgcacatacacttctgtcattgttaaaagcccatcgcaggactaactgtgccttgtcctgtggatgatagtcagttactcgttcaaatgaattagaagtcaacgttttcaccatcttgaggttcattgtattaactattcattgttggggacataaagactcttgcaagtatgaattttttgttcttaagtcacactgtattaaatagcaggatgactagtgataagcactctaacgtccttactgtttctcctcctcagatggatcctaatagaatatcagaagatggcactcactgcatttatagaattttgagactccatgaaaatgcagattttcaagacacaactctggagagtcaagatacaaaattaatacctgattcatgtaggagaattaaacaggcctttcaaggagctgtgcaaaaggtaagtccacatcgaggctgataagtcaagggcccttgctgactctaccaatactgaaaattaaaactggctaagtgctgttgactctgctctttttattctaataatttgtaaaagagctacagggaatgctttaaagagattagcagaattattttgaagttggtagtgattgattatggcaatcagggacgttcatgcaaatattcttttctttcttttcttttttcttttaaagaggagggatttaaattcacacttaaattcacaccttaagactaaggtggctgtggcctgtctgtgagtcagtatgctagtttgaattccctgacctaaaaaccatccgctcagttcacaggactttctggtagctgtttcctttctgtttggcttcgtaatggcagggccccttattccacatctgttgatccagggctctgatgagaagcagttgtaactcttggtcctttgctgtcatctgtggtgaagtaggcagagcaggaaacaatgtgagatggagattctgtgtccgtgttctcattttctgggagagctgagtgacaagagaagagttagggacagagaagaccaatgacttctcttacaccgacagccccagttgggaaacactgtaataactgccagttttactttcctggacaaagccacttgagaattctgcagcccaagaattattttactcactgactccaccaaaacccaggtagaacacaaacagtgaccccagtgcaaaacctgtgtgtacgttatatacctgcatgcatgcatccacttctacatcccagcctctgtgttgcaactccctgggtctctggtcattccagagtaactcttgaagttctcaaagcccttacctctaaatttaattctaatgtagtttattttttaaaaatccacatatagtaatataattatttaaaaagaggacatgtgtcagaggtagaggtaggaagatgtagctgttttgtaaagccagctaacaaaggtgaacgtctgtaataccatcagaggtagaggaaggaagatgtagctgttttataaagccagctaatgaaggtaaacgtctgtaacaccctgatagttgagatttgctgtattttatcgaatctaagttaccaattttcagcctactttgttatttcatgcatcactaagaaagaagaaactgttgattaaaaaaattaaacatgatcatcataggttctagaggttctagttgtatcttaattccagagatatcaaaacgttaaaaagttgtgcattatggaatgcatgaagtacctattagtttaatgtgtctataagaaaacacattgcttatgaaaattactttttcattatcattagtgtgtaggtgtttggcttcacgcagaatagatgtatatgtttaaattcagtgatccttaatgttacagtgtaatttttgagcaacagcaacagcaattctgttaatctattcatttttattgttctgttttatatttcattttcattcgtttgcttattgtcccacttgtgaagcttatctcttaaatactgagtaatctgtctttaaacaacctattcacatgcactaggggcaatctgctagttcaaaatggcatttcatattaaggtaattctggttgggcaaaagattgtgccctaatgttctgtttagattgactcatgttgtaactcctcaaaatgatgagataaactttttatttcattggtgtgctggttcttaaaagttaccctttgagttccttatggaagaataagtatggaaaatcagccaagttaattctgaaaataaataatattacgaacaaggacaggcacggtggctcacacttgtaatcccagcactttgggaggccgaggtgggaggatcacgtgagtccaggagtttgagaacatgctgatcaacatagtgagaccttcatctctacaaaaagtaaaaaaaattagctgggcatggcaacctgtgctgtagttccaactgctcaggagactgaggtgggaggactgcttgggcctgggaggtggacgctgcagtgagctgcggttgcaccagtgcactccagcctggcagcctgggtgacatagcaagaccctgctaaaaaaaaaaaaaaaaaaaaagaaaggaagaaaggaaggaaggaaaaagattattaacattatttatgagactgcaagagtggttcaataccaacgggttaaaggaaaaaaatatattatcatcttatagatcctgaaaagtgattgacaaaattttgcactatttctgatgtttaaaatccattagaaaacagaactggatggattcttgatgttattacgaatgtaataactttttatgtttttacataaatgtaaaattttaaataacattttacatttagttttaactaaaagttacctaatgattaaacataagagcatgtttcttaaagtcaggaacatgaccaagatgcccactgtccctacgttatttagcgttgttctgaaggtgccagctaatgtaattacacaagagaatgaaataagaaaatatatatagagaaaagagggcagaatttgcatgtgatataattatatacttaggaaaattcaaaagaagctgaaatgctacaagcaggataaaataaatcagtttgtaaaaattaataagtaataatcactagctgtccttatttcaaataactagaaaacatgagtgaaagatttcactcataatttttaaatgctctaaaaataaacataacaagaaatgtacaaggcttataggaataaaactagaaacctctacagaggcatttaaaatacaattggataatgtaaagacataactatgcacagtcataatttttgaggtataacttgggccaaggacagcagacaaatccatggaagagaacaagcggcttactgtgtgtctctctgtgagtgaatgtatgtgtgtatataatttaatataatacaacattactttaaataagtgaacatattctgaattcttaaaaagcatattgttcatccttttttaaaagttatagtaatttctcttgtcctaagtaaaaataaatcccagattgagagagtacttggtagccaattgttgctcactggcagtagtgtcccttaacacttagtgtggcttcactgaacttttctgccacctcctgcctcatcagaacattatcccacttcgtttgcgatttctaagtgactccttaggtagtatggaaaagcaatttgtatgtaaaggtgttagtgagcaataatggcagaattttcagtattttaggatccttttggagacatgatgcctcattccaaatgagtaacactaataatgagcgattcactacttggcaaaccataaggagaaaattggtggtcaggcaagaataatcaactgcgcttattaagggcatgtagtcttaattatactgataggttattatgactcacaggatgagtagaactttatttcatcaatttcacatttgcttttgttttgttataggatcttagcctttttgcataggtaataatatcagacacaagtaatcctttttaaagaattataaattaaagctgttataccaatgtgtgtttggaggtagaagatgccatttcttccccttagacaggatctttaggaaagagacaagtcttatttataccttatcattagaatcaatcagtgttcattaagtgcacgtaatgtgctaggcaccttgccatgtctttccctatgcccaaggatttacccttctcttactctattcagataattgtttgccaaatgtgttatcctttgatgaggattatcggttaatgtgacattctacacatcttgccaaaataatcagatttctcatttctcttgccaatgctaaaaataggatggatgcattaggcattcttaagtaagtttgtaccttagttttatttctaatgtagatattgagtgaacccttaaaacaaaattacatgtgtggctgcaatcattattgggagatcaacccctccagtggtaacagataccagacataagcacaatatcacattatatgtgtgcgaaaagtggtgtttacccaacatgtctttggtcagacatgtaatgctgtttttttccccatttttgtttgtggctgggttttcttggcttcccccaccccctttagcacagaactctgaaagcctctaagtgatccaaccctaccaaccacaatttataaagtctatcataacagtctatgacaataaagaaaacactagtacaaatatggtgtctgatttataaagtgattcttgtttccagttttggcagcctccctgcttctgccagccggggggtgaggaaggagtgaactcagatccaaacgaggactcccaaaatggcagagaggacactcagcccatagaccccctggccagactgggtggaaagccatctgtttatgcacttactatacattctaagcacttgagctgtgactgcacttgactttagtgtgctggcttgttaatttcacattgggtacctgtttgcagataccttcctgaaacttacttgcaaaggcatttgaaagaataatgtgcaggagaaaggtcaataaacaaattgcacaaatcacattcttctccaaaatgggatgttcagtgcattaaagatgatcccctgggatgtgggaaagaagcatagggactttctgtatatgtattttttaatattagcttttaaaagctgtgctttagtaaatattttggaatgtacaaatatacgagagtgattttatttaatatttaaataaatacatatgtacatttcagagcatgaaaaattttttccctgatggagctgcacagtcagccatttttgaagatcatggagtgaagctgcaagctccatcaggacaagggccacagccatttcgcgcacatctgaatatatcacacttagtttattctcaggaatgaatggagaaaagcatgaacaaatgatcaatgacttattgaactctgtaaactaatattttacatcaacgaactcataaagccattcagaatgttacaagccttgttcttatttatacgatgctgtcttaccagtcctacaattgataattaggaatattatggcctgaggcagtaatgcttcagtacaataataacacaggtttatttttgttagaagttacccccagctggccctctcacatcagtcacattttcatcaggcttctttgttctgcataacctgactgctatgtagaggtgggcttataatgtgaactaaaaacatgattctggctccatatatgagttaaattttataaaactctctaacttccctccaaaatatgaaaagccaatggtattgtaatgactgctgataagttatcttgttgtcatatcctcaacaaaccattccctggagtataagcctttgagtctctaaagacttaactggagaacaggaagtgagaccagggagccataattattaaacaattcattcttacctgaaattcttttttattccctgggaatcaggtacctatttggcctcatcttcagaattcataatgtagaattcagaattcacaatatcctctgatattaagattaatatacccaaagatttgtagcactttgatcctcaatgaagtatttgctgttatttggtatagtctgagctgggtaacaaacagacccatccattcagtgaactaactaagaaactttttccctctcacataacaatccagacgtgagtcatccaggaccagtagggatgctcctctgtcctcagcatgaaccttccatctctgtttctaagttggcttctccatttgctgttatttctagataggggaagggtaaaagaaaactgaagacagtacctggaagtggagacatcacttccagtagcatcatatcggctggaagttactcataaaccacatcttgctgcaagggagactggacaaggtagtctctagctgagcagccatttgtccacaaagcttgaggaagggagttgcctataactaataggcaaaaaggagtggaaggagatgaggggacaatgagcagtctctgacattcactaaaccccatttaggtaggaaggaggactcaccatatataagcaagagttaactctgagaacacataagtctattaaaaattttaatggtcaagattgtattttcaaaaggtcaaaatactttgggattatttagattgcaagagagtgagagaaatttgaaagtagattcaacagcattcatctttttgaggaagtttcaaaggtctgtttagagattgcatctgtgattgtggaataaaccttgattgtcacctgcaccgcttttgctaggttttgtagattaaaaagagcattaattaaaaactagaaagttcaccagattaagtgattgtgttttctacatatgggaaacagatccccttggattgcaatctccattattataaggagctcattcctatttttgaactaatgtaaataagaaatcaatgaaatttaaatagattgtaactgcttgtgaaactgtaatcattgaagttgttatatgccactatttctcatttacctattagttaaaaaaaggagaggagggattaaaccccattcattgcctctttccctttgtatacaagagtatgtgtccgaagaaagtttctcataaacccacaagggtacttggtttttggagcactcatgttcccaagtcacgatgttagtcatgtagtggttttccaataggatttcatctctgtttgccataatagttttggaaactgcaattcaaccccaatcacatttagcgtttataaaagctgtctttatgggaaagctgaagtaagacccacagagttttcctacaaaaccaaggccatctattggctttagctcaacaataagttattggcttgtactcaatttcaggggagacccagggaagaaggtaggaagcaggagggtttgcaagaggaaaataaccggtgagttatgtcagaggtgggcttttctttgtgttacaagtaccccaggatggaagaaaagatattctgcatgacatctttaaagaaacagagagctggaaggacatgcttgaaagaggagccttcattatgtggcctgggatcttgggctaaccttccagaagtggatgaaactgagggtccttggttggagagcatgacagcaagggatagattggattgttctaccagcagcggcaggagaggtacagcctgtgtaattgaagagcgggatgtgccttagagcagtgtttccaaacctcctggatcttaagactcagttggggcccttgttttaaaaagagaagagaaaagtcctccagatctatcagtggggactctgatttggcagttcaggggtggactctgtgatttcttcaaagcatcctaggaagaggtgagagccactggtggacagggaagccatggtgaatgaagtgactatatttgagaaggagtgtgaagcctgtgtggtatgaaagaggtgggtcccggaaattgtcaagagctgtctgtttctgagatgaccagacaacaaatgcttgctcaaacttttggaagttcagggtgttggggagttccattctcacttagcttctgcatcactaggctgctactcctgtcctcagtctttgcccttcaagaacactaggtagcggcggcggtggtggtggtggtaccagtaaaaataatcatcataatgataaaccctaaggctcatattcatcaaaaagtttgaaagcactcagaactcttctcttcagtgcctgtggctgcttttcatttgatctagtttttcatggtgaatgacaataccattatctccaccaccccaaactggaagtcagaagatggtcttatccttttattcacccactcttcacctctcccccatcctgtgaattctaccgccttacaaaaccttcaagtattgtctctactctgctcactgtgtggtcacatgaacagaggtcatcatcctctcttgcctgcatccttgcatctggccaccccctcctggtctcactgccactggcccatccttcccatagctgagggacttcgaaaatgcacatctgaacaggtcatttcttttcctgcttaaagcatccttcagtagatcgctgtggttgtcaggatgaagtctgagctgctgaacatgtaacaaaaagtcctctgtattctggaaagcctcgttccagcccctgcctcttcaggcttgttaccttgaatgctccatgtcatcgcctccatcgcaacttgtactccacggcctcaccacactatggtgctgaactctcccgacctggccataccctttcgcctctctgcctctctgctgtaatcagcaagtgcagagagggcaaagggcatgtctgtcctgcgaacagtgtcctcagaaacccacaggactcctgactcctagcctccatcagtaaactttgttgaatggatgaatggatgaatggatgaatgaatgatgagtctttgtgcatagtcctttgtatgccactccatgcccttctttgtgtagtcggttttctaattgtcttttaaaatccaactcaggcattacttcctggaggaggagcccacagatgcccgcccacccacctgtgggggtaggtgcccctcctgggcccacacggggcttcttgtaacagcagtaaccacacggacctggggtgaactggctcacttgaatgtgagcttcccaaggacagggtctgtgggatgtttcctttctacatttccagccccagtggcaagcacatagttggtgctcagtgaaagtttaaagaacaagtttaatgaatatgtgagtgacctgtgccctatgtgtgcacacttggtgtgctcaggtggcgagttgtttaatattgccagaagctagccagccatgtgatcaatccataggattcttaaggggctggaggtcactcgcaagctcagtgttttcctgcttctttgagaggagagctcttttcctctttggagcgtgaacacgttagggaccttggggttaggggtgctccttcactggtagccttggcccttttcttcctggcctcatggatctaaagcagctggcctggtatctctgaccccctttgcgtctcattcttagggagaagtctgtgagagcaaagtcttttccagaagagatgaggatttgtcaatgtagaaagcactgccaatggaaggtggcattatttttcaagtggcagaggaaaacagagacatggtaaatagcacaattagcccaagatgccacactgcagttactctgccaaacttttagatgacactttttaaaccagtagtatagtataagacatttgaaaatcgggctctttatgaagactaacattgctgtcataagactactttatgaaaacccaaggggacctttatctgtagcagaagctttctcatttaaaccatgaaggttaaacaataaaaactaattttctattcccagcatacccatcgcactcccaggaaaagcatcagtctgctttatgaaaacaaggacatgctattctttagctctttggtaggtagaggacatgaactgtttgcaaaaacgagtctcttccaattagcagacttcttttggaagaaatgatccaccagtgactgtatttggggtttggggaggaggccaactcacatcttggtaaagtttttcactgagaattttcactgatgggcatgggatggtggccgctgattcagtaggagctggagcaattaggaggctgagtgcagtggtagtggtggtgcggagtgtgtagaattcatgttgacaagagtttggctttgggagaatttgattagtcagtacttttatattaaaaataaagaattatagggatcagaatgttaagttacaaatttaaggtgaggatggcttttaccttcgggatgagtggggtctataccctacctaccttcgctcctcctatctgcctgctgggccactggaccccttgcccacctcatgatttttcccctctcctctggggagggtgaggacctgccctctcacctcccccagtgctcctgtcctctcccttcctggtgtcttatagggctctgctctacggaacctaggctgagaagggcaatccaccatgatcttttataacatgtattcaggcaacagagaactcaatgaatcctgctcttaaagttctttgctttgggtgtttttgcactatgggctcttcataaggaaccaggggtcaccagctccatccaggtgcatatatgtgttcccccacatcctgtggattgcaaggtcagtgtgagctttaggggagggaggaaagcgagaggctggggcagcgatactaaagcctatctcattagctattgcacaacacccagtggccactctttctgtgccttgttagccaagaatgccgtggaaataagagcgttgcaattaaggatgagctattgatgaaacactggctaaggcagctttccaagggagcagtgtgtgcaaaagtctgcatgtacaggagggcagagttcttgcaggtggaactaagagtaatttcatgaggctggaacctatggcatcccagagcctccttccaggtgatgaggtttgggagtacaggggaagaatattaggggatttcggagtggtaaccagactaagtgaaaaactaatgtttttctctgtactctcataacctgtctgacaccaaatatgtggcgtttgccctcacacaaagcagttctccaactcttcaggcactaattggatgttctgcaattcaattatgatactaactattgggaggtaacacagccccaacaggttaaaggctcagccccacaagactgtcccacttcagatgccattcacaagtgctaggttgttgcctgtatttctgaccaaccagctacaaatcgggggttcccatgacctcctactcaggttcggtaatattcttgaatggctcacagaactcaggaaagcacttgacttactatgaccagcttattataaaggatacaatcaggatccacccaatggaagagatgcttagggccaggtatggggatggagagggtcgtggagcctccttgcctctcagggcatgccactccctcagcacctggcatgttcacctgctaggaaggcagtggttaccctggctcaagcccactgttgagagtttttatggaggcttcattacatagacatagtttattaaatcattggccattggtggttgatgtcaaccgggaggtcaggaagtcaaggggtgtgatatggtttggctctgtgtctccacccaaatcttacctccaattgtaattcccataatccccaagtgtcaagggtgggaccaggtagaggtaattggatcatggggggtggttcccccatgctgttctcatggtagtgaatctcatgagatctgatggttttataagcatctggcatttcccctgcttgcactcactccgtcctgccaccctgtgatgaaggtgcctgcttctcctttgccttccaccaagactgtaggtttcctgaggcttccccagccatgcggaaccgtaagccaattaaacctctttcatttataaattacccagtcttggccagttctttatagcagtgtgaaaacagactaatacaggctgggactgaaagatccaatcttctaatcacatgaccggtccctctggaaaccagatcccattctccaagggtcacatcattagcataaactcaggtaaggttggaaggggctgattttgaataacaaaggatgcttctgtgacacctgtcacgcgggaaattccaaaggctttaggagctcagtgctaggaacctgggatgaagacgaattgcatatttcttattatattacaatattacacaggcccagttatgcagggccttctaagccctggtaaggaacgtggacttgaacctgaagtctggaagcagcccccagaggattttaagaagggacatgtactttaggatgcactctaacctcagtggatcactttgaggagggcaggagacaggaagaggaggtaggaagctattatgctagtcctaatgagaaatgatgaaaacttgaaggaaggcagtggtacccaggttggagaggagggaatggatttcccagctatttacaaggtggaaatctgcaggacttctctgcaggaattggaaactggctattcattttcagaaataacccatgtgtggcattcatgtgctaactcggctgatgaatgcactattcttgtaactaggttggagaagaattacatgaagggtatcattaagatgttaaaatgaatgcattacatatgttaacaagtgtatgaaccctgtattatatctggcaaacggggtgttaaatccttgttcaaccagccagatgtctctgcagctgctgctggtattgcagagggaggcagccacctgagaccccagctataagctggtgccagtgatttccaaagcatctggctgtacaaattccttcttctgtgctctgattgacaggtaccacatggatcacacaattcacatcacaatgcacaggtgagattttcagtctgataagcccagactccagcaacttgaccttttcagaatatctttgcagctgagaatgttctcagttggagctgaaatctatttattattattattattaatttattttttttgagatggagtctcattctgttgcccaggctggagtgcagtggtgtgatctcggctcactgtaacctctgcctcccgggctcaagcgatctcgtgccttagcctcccgagtacctgggattactggcaactgccaccatgcccagataattttgaaaatatttttagtagagacgaggttttgctgtattggccaggctggtcttgaactcctggcctgaggttgatccacttgcctcagcctccgaaagtgctgggattacaggtgtgagccactgcaccaggcctatttatattactttgtaagttgaaaaaaaaaacactgtagtaaaacaatcttaaaaacaacttaataacattctctcctgaattggaatgttatcaaagtcttgtttggggcagttattcagctgaatttacaaagagggacgtatcctttgctgtaaatgtttaaattgcctgaagcaaaattcccataactacttaaaggagttgaaaatactcctaagtgtttatacttattcttacacagtaccatctctcctgagtggccctagtttactgagattgagccagctctgagacatctccctcctccttaagtttggcaaatatcctaaaacgtttgaaaagatgtttaaaagatctgaaggaagctggtctcaatggaccagagacaaagtctgcacagccaggctcctgggaattgcacttcttggatgttgagttcaggagaggcagtactagagaccacagttacacaatcacattgatcttttgtgtactttgtttcctggagaagaaattgtgtaatcccagcatttttttatgagttaaatagaagttgaaatttaaaaaaaaaaatcacattggttgttttcctgtctgtttaaatgtactctgacagcaaagatgaaaagttaatgcagtctaaatagaaaaataccacaatgagaagattttaaaaaaatattgtgaaatatcctcatctctattgtttttagacgttggggtttcaaatctgcaaaggctgactgcggcgttgtcaggattgtcaatgttggacagcgtccactaggtggcagtatctcagaaggtttcttttatccttgaatgggcagagatttctttggttgctctctttggtagttcggtttcctttttttgtcttgttttgaagggttaaatgaagctatcataatttacttatctaaaattgcacttatctaaaaatgcataaattcattgcaaggcctacttgttacagcgtgaccataaatgagtttattcattcatgtgaattttcttggtaacttattattaatgatcctagcgtgtaacagatgatgaatatgccgtatcctgagaaggtagatcacaaatcctcctgggaagctggacatgggtgctcattagccaagagaagaaaataggggcgtcctttgcccagcttcctcagcctggtaactgtttctggcttctgctccaggctgttcgctgagaggtttgttgaagttacctgcacttctctacgcaaatctacaggcattctgatggcgtaggtaacatgtggttgtgttggatgtttattcagagtgttaactaactggtttttgttaatttacagctggcttaaaataagataaaatgtacatacattttttaaaagatctctttcatgtgaataatttgttcagaagaaaggagtcgggatattcttttgtagtattttcccaaaattagattatcagaactttctgaattcaaagaaaccggcagtgccgtctgaatgataagattttggaataaagaactatagaaattttaaaacactctaattaatctgacagatgtagaggactaatgtggatgaaaagaaatgtaaatgcaaagcttagaaaataaatggaattgtcaattggggtgaagtttgggttcgtcttcagaaggactcctataatcctgaaaatgaaaaatattagggggctatcaaaaggtctgtgtttggcatgtgcatagcaaggtctctgatctttgagaagatggcaacatggaatggctccagctttgtggagtggactcgatagggtcatgtttggagatgcaatgtcccttatccatgtcctgcaggtcttagtcttgggggttcatcagccaagccataaacatgggttggccagttctcagccagttgttttctgaagcccctgggaattctgagatcatattttctgatgtcccggctcctttttgtcagatcccaggatccccagcagccagatgccagtcaaggtgagccaccttttcagagttactgcttcagggagggagtcacgctagggattcctgggtgggctagtggtattttgtcccagctttcaggagtgtattttatgacgatggcttgtaaaaggatatgggcatacagatccagagaccaaagttcaagtctcagctttattaggtgaagccttattctctctctgcctccatttctcagtctgaaaaatgaggttagtagtagttatagttttccaggctctgattctaacaaaagtcaaatatggtaacagggaaaatactttgctgtctacaaatgtaagaggttattaaattttcaatacgtggaatatatatgcaagtcatgagactatagtaaacccttaactaaattgagatgtcaccaaacaactattcatgggaacacttaattagtaacaatgcttctcaatacctgctacatattcttatcatctgggagcatctttaaaaaactacccagtcactatcagactaattgggttcattatcctggctgaggttggggtcagggtatgggtatcttctaaactgcctaggtgtctctgctgcgcagccaggtccctcactggaatgcatcaagtactgcctacaaaacttcagttacaatctcaaggccagaagacaccctaaaagtctagtcttagaagaatgttatttttatgattgatatctgtgcacataaataacaatggttttagagctcaaaaagctggggtgcagatacagatattgggaatactttctttgtaccttgaggtacatgtctatagacagtcatgcgctctctttttgactctgaaacttacctataaggtttctgaggggaattgcaatccttcaacacccaaaaggtataaaatgagagcagcattacctcttgggtctctagctagagttttaattcatcctgggtcatgaagccttttgttcttttttttttttttttttttttttaaagcagacattgaaagtgcatctgagaggtgctgctggttactgaattttcctgaaacaaaatgggtccgtagcaactctgacctagaagtttctgattaaatgggaaagaaaagttcatagttcattcccgggtagaagaggacaaactttccctgtccgttgcatcggtggcttgagtctgctgcttctttggcctggatatcaagctcccagaaaatctccagtctgtgcctctgtgaatctttgaggatgtgaaagggattgtcattctcagatgaggccccaggccagcaacaccagctcactggtgctgaatgcaaattctcaggccccaccccaaatctactggatcagaaactctggggctggtcccagcagcctgttttaacacgccctccaggaggtggtggtgcaatgcatacatgctcaagtttgaggaccactgagctaggacaaaggcacttttcttgtttttctttttctttcttttattttcttttttttagacggggtcttgctctgtcacctaggctggagtgcagtggcacgtcacagctcacttcagcctctacctcctgggctcaagcaatcctcctgcctcagcctcctgaagagcacaggtggatgtcgccacacccagctaattttaaaaaattaatttttatagagatgaggtctccttatgttgcccaagctggtctcaaactcctaggctcaagtgatcctcccaccttgacctcttaaagtactaggattacaagcatgagccatcatgcctggcctggctttcttgattataagtgtgtttgtatagaaaatcacaaaacaggcatttgtaggtatatgctagacttagttctgcttccttctccccttccccatctctcctctgatggaaaggcagatcagagctagagggaaaatgaggggtagcgttcaatctcagaattactctgtcaccaaggttcctcttccaatcttttaagagccagtaatcaagtaaagatatactgtgtatatataaccatataaagatatacacaatgtttagagatacgctgcatatccagctttgctggcaccaaagtgaagaagagatgaacagaggaaggtctattccctaaggccacccatccacctgcctgacaagaactgggaaataagaaactgctatcaaggcatgtccctgttacatgtcagacccctccacacactcccacacttccgcagcacttggcacctgctgcagcaagaaaaatgcccaaaagccaactaaacaagcagtagcatttgaaggataaggggcccaatggctgggaaactgctgatgtgagaaagaccgcacagttacactcacatttgcagcaggtagtagagcgccatgagcagcttaataatgaaattttcctatagccttaagggagaaaataaaaacctgcagaaagaaagaaagaaaaagatgcactgtgttatctataagtctgttgtgaaggcaggggagacaaaactaggaaattccagaaattaggcaccattgagaacccggaggtcttgaggaaatcttggaagactggaggttgacatgagtggggaagaaaacgaggcctgggaagggccactcaacccaaaaggggctaccatgtgcctaaatacccgccctgcacacggcactcccagagctgtgcagtgtagtgccctgggtctaggcaacagcagaaagtggctttgagtgagtcctagggtttctttctaagagtcagccgcactgtgactagaacttcagaacaggtcagtgaagacagctgtgctatctcctccaacggtcattaaaaacaacgtagattcttatctctctctcagaagtttggaagcagaaagaagaataaatgttatctccagaatccttccagctaataacagttgaaattatgttattgcctctatctatctatctatctatctatctatctatctatctatctatcatctatctatctatctatctatctatctatctatctatctatctgtctatctcaaagccctcctctctagacacttaaagaacttaagctgcatggcctatctttcaaacaccgtggggagaatggttagcatgaatagttattccagtaacaggggaaattaggaatctctccagagtggttttttttcagtatccttataatagatatctcttttgttttttgtttttgtttttgttttgagatggagtctaactctgtcacccaggctggattacagtggtgcgatctcagctcactacaacctcccccgcaacctcccggttcaagcgattcgcctgcctcagcctcttgagtagctgggattataggtacccacaaccacacctggctaatttttgtatttttagtagatacggggttccactgtgttggcccagctgatcttgaactcctgacctcaagtgatccgcccatgccagcctcccaaagtgctgggatgatgggtatataatagacatctaaatttaccaggcactctgctaagtgcctacacacattatctcctttagtcttcacaagcaccctgtgatggggtgctgttaatatcctccgtttatgcaggaacttgaaccaaggtgaaagcctgagctttcatcccctccaccttactcttgccctaagatgtgacattttagtgtcagctaatgtctggatacaggtgggcatgtggttacctatttcatcctttattctcagggttcaaattgagatatgcaattacctatactctttatgttttttcttttttctggcttgtgcttctaatcctctatttgtggccatattttaagttaattgttggtactctaaaggctcttagacttccatatagtgctttaagtacactgtaactttaaagtaaaaaattaaccactgggagctaagcatcgttctctttcctgtgggctgagctttagtattataacagaaattcactaatgaaatagacatgaaaagagccttccagaagatttaagagggtcatatattctgtgtagttgttattttcctagttaacttcatctccatttgtgtacctgctacagatttttaattatgttcaattacgccatggtttataatctacatcgtcttttacttcctcttaccgtccaaagtattttgtttgaagttgggtatgatctcaaacacatcaacaccaattcttttgggggaacttccattgatagccacctaatacatataggaatttcactgccaatgttactatggcacctttggaaggaaaagagggttaatttgttgcatatgtaacagccctgaattcttattgctttacagaaagaatgattttataaataaaattatttttcctttttatttcaggaattacaacatatcgttggatcacagcacatcagagcagagaaaggtaagcatggatccatacatctgtatgaaatcccacagggtcactactattttggctataataatatggtttctctcatctccagcgatggtggatggctcatggttagatctggccaagaggagcaagcttgaagctcagccttttgctcatctcactattaatgccaccgacatcccatctggtaagctctatctgcatccagcctgaaaaatattttaagagtcatttatcagcccatttcaatactgaaacctatttttagtctgtcactgaatttttgagagcccttacttcaaagccaaaggaaagaccattcatcctcaggtgatgattcacatcctggaaactgtgattctcaaaaatgtcagaatggacatcatcaccctattcattttcagatcatcagaatggatgcttattttaaatgactgccagctgaaagcctgtaacctggaaggacaatcctttgttatgctcatctgtactttcccaagctaaagttgacacagccctgctgctgacctcggaggtgaatgaattcatcaggtagtcacatactcagctatctcctgcagaggtccagggaggacactttagacccccgttaagatctttaagagacagtaaccctctagaaaatgagatctcctcccccttctccaagggcttatcattttctctgagtaaatgcttagcttgatggactagagacctgattatcttgaaaatgaagaaacccggagctctctgcctacagctactgtaatacaccagttattccatcatacaacccccactggttacttcaccatgggctagatagctatcaaaaagataacagaactttatgatacagtgacaattgaacattcttgttatcatcatgccactaatggaacacttgaagatcttaaagggggatcttcaggtgtcctccctggcactctactggagatggctgagtctgtgactacccgatgaactcttccacctgtcaatcaggtgttttccccttcctcaatacctctcatccttactgcaatcctgcaaggtagggattatcacgcaaattttgcagacagggaaactgaatgatacataggttgtcatttgttcccagtcatgatgatgataggattagaagtagaattcccgtcccgttgattgctaagtccgtgctttccatgctctctattatcacataagcaggccacaaggtacttgtggtcagttggcttggccagagggaaagaattcaaagcccttatgtttctcttttcctgtgagaagtagattcatgtgacgtctaataacaggggtgctaaaatctgactgcctgggtttgaggctccattgtcctggctctgtgaccttgtacaatttattgcaatcacatatgcttcagcttcatcatgtctaaaatggggatgttgatagcatctgcctcaaggggtagctatgaagatgaaatgaggtagactgctaacattcttgtgtggaagaacggccatagtaagcacttgggagtgtgatttgttatttttgagttcaattaaataattatacatattccacctttttcctacaaataatttaaggcaagtttttctcggagttaaagaaagaaagttcaagttttgctaagttatttggaaaactttgttacggcatggacaagggggaatttttcctgaccgaagacacagaaagggagaaaccaattctttggcttttagaggattttccaaatgacctctcctgtcccagacacttgcttcataaataatttgtctcactgtgtgtctatgcatgtcttgtggtggagctacactaattttctctgagtggaaaactgttttgcatgttagcaaaggcaatcaaataaatatggatgcatctgtattaatttctctgagtggaaaactattttgcatgttagcaaaggcagtcaaattaatactaatgcatcagctgtgtgtgctattaatgttccctacatttatcttttcagttcactttaaatggcatatgataaatattgcattagaccgtttgccaaagtctgtttggcaatagcaagcatgttttagttataaaactctctctgcaggcacctagcatcaaatcattgccaaaaacacaaggcaaaactcctggttattttctgacagttattgagtttgtgactgagtgagatgagttagtgtatacttctgtttaagaaaatagaatttgtggctctggctgggcccacaactccttgagtccatttattacccagttttggccagtactggaggtttcagaggaagtggctttaaatttgcatgttcattttggggctctgttttatacttacttacacaagtaaaatcagaatctgccttatatggactgataccacttgcattttcaaaatatcttagatgaaatgcgttgggaagtatttagtgaggtcagaatacatggctttctttaggaggatactcaggctaaatatttgcagagacctcttctgcggtacttagcagcagggactgaagtgtagggcaggggaggctgggaaagctggcaggctggagtcaggggttgtcagtgtgcctcagtgatgaaaatccaggtttccatgtgaggcctgctgtgtgatcactgcatatttttctcatgtttttacctggtattatctgcttctgagtcctctcttcacactgactggctctcctccttttcccccatacgtgccatgcatattccattctttgctcagtttccttcactgacaataccctcccttttctcagcccatccaagtctgacccaaggccccactgtcctctggcttctctgccccttcctgagctgagctctcctgcttgccatgaatttctgtagctgtctcttggcagttgcttgtaactgaatgtcaaccatgtgctatgcaacatgcagaagtgaaaatgcatattttatatgctcattttctattttctctactattagtggtgagtgccattaaggcacagttggttgatgtaattcttaattacgggcagactgcctgttcctaaaaacaccacgtagatattgtgtgactgatcaaaagcatgaaccagtgaatgtatgagtaagtcaatgcacaaaaatagagagatgtttagtaggaaataagggcacttcttccacatgacttacctaacaatgggaatggtaatcggtcaaggttcctctcttctcctgcctctctatttcatattctttccttgccttcctaggccatatcttgctctaacgccagctgatccatcccattgagagggtagacttctcttctgttaagagataactataagaaaaatcattgattgaacaacaaattgactgcaagagtgggataagaatgaaggcagcatgggataacttgagatgggaaacatcttgaatttcatggattttgtcaatggattagaggaattgcttttactagtgttcatgaaggtgtgatgatcatgctcactcacttggggccagatgatggtatttatatctggggtgctttaatctgggatgacctgaaataagacctccgatgaaaaagaagggtgtttattgtggtgagcccaggaggcaagagggcctgtgatgaccccgctgcagataggttgtggagttcaggaaatatcctgtttctggacagagggattggaaccattgaattcttggtcttctcatgatggattgccccaccgttggatggcccttgctgcagtttttctcccaagtggttgaaagaactgcctgtttggttcctacagcctagttttgaggctcccagatcatatcccaggctcccagttctttagagataaaattgtagaacattctctatcttgtgggcctctagagaaggatgtagatgttcaaggcccaccaaaccagactaggctgggaaggtaactagtgtgtgtttccttttttttgtttgttttgtttgtttgttttttgagacagagtcttgctctgtctcccaggctggagtgccgtagcgcgatcttggctcactgcaacctccacctcctggattcaagtaattctcctgcctcagtctcctgagtagctgggattacgggcgcctgccaccgcgcccagctaattttttgtatttttagtagagatggggtttcaccatgttgaccaggctggtctcgaactcccgacctcatgatccacccacctcagcctcccaaagtgctgggattacaggcgtgagccaccgtgcccagccatgtgtttctttctcgatgaggctctcataaggattcactctaatcagagagctgtcagttttgatggatctctggaatccactataagtcttcatctctgggctaatttatctccctcagcatctcagggcctgacctaagttgtggttgggtgtgacaggcagcagtgaacttcttgtggctgcaggaactctctcaactccagtctgagactcaactctgctttgttttgctgatttcaaactgctgaccaccttagtttagtataagtatttacaaaatcctctggaagaaaaatgtatttttgtactttccacagtattacaactttcccaccattagttaccagcttttccagttgaacaatagtgtccacatcaatacaaatctttgattaattgggtttatcacagaggtattgccaatttttaatgacccaggaaaatacaccaaaggacctgaaatatgaaaaggattggacacactgctggtttagaaggttctttagaaatttttactgctctgaagctgtagcaagaggaccaggtgtcacctcatttcaggggtgagtagggctaaatgagaattctggtcagtcaggagaagctttacagacctttggtcagaaggattgtgtgaagttgttaagctagggagtgcaatgctaagaatatgttctttttgagcttctctggagttagcttttcagttgtgcaagctaaggtgggagacacttgggctactggaggtgaagaaaatagattatgagaattgagtttagacgtctgacctttcagccaaagttactgtgacccagtttttcatctcctactttccctcttcatgagttaaaagagaaggttgagacttgtgacatgtggaaattgtcttcctatcctagtttcttgctttcctgtctcagttgcctttggcttatctcttccttcaacctggaatgacctttctgctcctgtctgtgtggctgaatcccatttctcttaagttctcaggcttagcagcaactccacaaaggcattctttacccttctgggtggaaagttgttcttgtctctccgtcctttgagctcccatgggagttactgaaccttgcctattgttactcatgccttacttctgctctgaacacatatcgtacttacccctggtgcactatagacgccttgagggcaggaaaaatgagtttttgtcttcgtagcctctactgtgcctaacagaatgcaccaagtacatctgaatgtattctccccttctagaaaagaaatgccaataagttattctccctttgaaataatgactgctatactattttttctccctaacctcatagaattgtgaagacgtccttctcatttaaggactgactttcaaatcttatgcctctcttctccacaggttcccataaagtgagtctgtcctcttggtaccatgatcggggttgggccaagatctccaacatgacttttagcaatggaaaactaatagttaatcaggatggcttttattacctgtatgccaacatttgctttcgacatcatgaaacttcaggagacctagctacagagtatcttcaactaatggtgtacgtcactaaaaccagcatcaaaatcccaagttctcataccctgatgaaaggaggaagcaccaagtattggtcagggaattctgaattccatttttattccataaacgttggtggattttttaagttacggtctggagaggaaatcagcatcgaggtctccaacccctccttactggatccggatcaggatgcaacatactttggggcttttaaagttcgagatatagattgagccccagtttttggagtgttatgtatttcctggatgtttggaaacattttttaaaacaagccaagaaagatgtatataggtgtgtgagactactaagaggcatggccccaacggtacacgactcagtatccatgctcttgaccttgtagagaacacgcgtatttacagccagtgggagatgttagactcatggtgtgttacacaatggtttttaaattttgtaatgaattcctagaattaaaccagattggagcaattacgggttgaccttatgagaaactgcatgtgggctatgggaggggttggtccctggtcatgtgccccttcgcagctgaagtggagagggtgtcatctagcgcaattgaaggatcatctgaaggggcaaattcttttgaattgttacatcatgctggaacctgcaaaaaatactttttctaatgaggagagaaaatatatgtatttttatataatatctaaagttatatttcagatgtaatgttttctttgcaaagtattgtaaattatatttgtgctatagtatttgattcaaaatatttaaaaatgtcttgctgttgacatatttaatgttttaaatgtacagacatatttaactggtgcactttgtaaattccctggggaaaacttgcagctaaggaggggaaaaaaatgttgtttcctaatatcaaatgcagtatatttcttcgttctttttaagttaatagattttttcagacttgtcaagcctgtgcaaaaaaattaaaatggatgccttgaataataagcaggatgttggccaccaggtgcctttcaaatttagaaactaattgactttagaaagctgacattgccaaaaaggatacataatgggccactgaaatctgtcaagagtagttatataattgttgaacaggtgtttttccacaagtgccgcaaattgtaccttttttgttttttcaaaatagaaaagttattagtggtttatcagcaaaaaagtccaattttaatttagtaaatgttatcttatactgtacaataaaaacattgcctttgaatgttaattttttggtacaaaaataaatttatatgaaaacctgccttgtgattttgtacttcaccttcatgtctcttttgctctgtgatcctattattttcaatatggtaatgtggcttctatctctttccaaaggttactgggagaaatgcagatttaattaaaaattagaagcagattcaattaaattaatgatccttggaatctgaaaaataatttgcaaggaatttgtatgcaaggatatatccagatagaaaatggagtcttcttcacttaaaaaagccaaaatttatattatgttgatattgtgagaaaaatatggtgctttgtataagttcataatgtcttaaagaataactgtgcatgttgtgcacacgtaccctagaacttaaagtataataaaaaaaatagtaagaaaatgcacgcacacaaaaaagaataactgacctggaggaacacctgacattttataccttactgtggtaaggaagaattaacagtgtcctggactcttgttctcatggaaatttatacaggaaagctgtctgacccaggttggttacttatgtgggagagatataagaaaataagcagcttgggaaggcactgtacaccataatctaaggcacttttcatttatggataaatgtttttagatggctgtgacaggatagaaggagagaagaaacagcagatgttacaaagaagaaattgtaaaattcaaacagcagagctacaatggtggaactcaatcattggccaaaatagacctactatttaaaaactgtcagtacgtctaaggtcaattggtataaaatatgacttctgtgtttcatgtcccaattgctgagccttagtttaaggaaaaaataattttgataggcaatcagagagtttctccactctccattggcactgtcttattatgtagagtgcctcattagctactgttgctctcataatactattctgttataggactaacaggttcatatgcccactgcacagtaacagtccaagtacactgagacagcaagatttgtggcagaggaagagtttaatgatctcagggcaccaagtgagaggatggaaggagactcagattcatctcccccgaggagttctgggctgaggtttttaaggggattagggagagcgaggggttagaaaattggggtcattgagtggctggggtaagagggatgaaatcctcaggatgtggaagctgcattccttggtgagggagcttctcatggggtcctcttcagatcagctggtgtcagtagttttgctgatatgcaggacctgaaagaatgtctcaaagggaaaacttaacattttgtgatgttcaagctgttatctatggagcatttaaagcgaactataatcttagagtctacatgattctaagacaataggcaaatagctatgaggaaggggtcggagagcaagctgacctagtgatggatgctgagtgtgttgcaagcttgctttatttttgttttcccccctctttgcttccctgataaatgttataaagtttatagggacagtttcaaatctgtcatttccaaaggtgaatgacattcatccatttgtttgttccatattatttcttgagtaccatctatgtgctaggcactgtgccaggcatgtggatgctatggcactctccctgcccttgaggagtttccattctagttgggagccagcctagcaagggtgtgtgtggtcagccctagggtgtggacatacacagcaggctgtgggagcagagaggaggctatggaacccatcttgggagccacagaaagtctgaaaatgatatcagactggataggaagtggggttgaaaaaagctttgaaagtggatatagaatatccgttaccatttttaacttagaggtaactgaatgtgcagtctctcaaagatgaactaaaaatccaaggtccaggaatgaaaaaaaaaacaccccaggatctagtgaggtaagacatggtggcaccagccaaactggagaactaacatggtagagggcctgcaaagccaagggacagcctgtattgaagaccccaggccgggcgcggtggctaacgcctgtagtcccagcactttgggatgctgaggtggctgaatcaggaggtcaggagtttcagaccagcctggccaacatggtgaaaccccatctctactaaaaatacaaaacgttagctgggtgtagtggcaggcgcctataatcccagctacttgggaggctgaggcaggagaattgcttgaacccaggaggcagaaattgcagagagccgagattgcaccactgcactccagcccgggcgacagaatgagactctgtctcaaaaaaaaaaaaaaaaaaaagaagacctcaataatggagcctacctgtaatgtgaattttatgtacattagcatcatagcaggtcagagatgttttagagctttgctggaatgaatctatgacttaatgaaaagtgagtataaattggactatgccttgaaggaggcaatggtagcaagtggatatgccaggaggtatggaaaagacttttctagtcatgctcaaggcttgccaggctgagttgtagggtctaaaatgcaggatgcaaaataccctactttcctcttcacatgctacttttttacttctgtttttcttctcactcatcccttttacccttttgtgtgtgtttgaactcttcccttttttcttttcctgttccccccaatgcctggctcttgcctcagatgacaatttcatttctgtggtgggcctcggggaataaggaggctgctgcatctaatggagatggaaccaggtcatgtcaacactcagtgacagctaagtgtgttgaggtgtgacaaaatcatgtcaggaaaccaacacatatgatggcaaactcaattgtttgctcattttaatgacttcatttcaatcttattcctaacacatgccaaatctgaaggaaggaaagagtgtcaaagttgaagccatctgtcttcttgaattgacttgcaactccaccagaccatgcacccttgcacctttcaaagcgccatgtgtgcaccaatttttgtttagtgtacctgttttcccctctttgcctatttccttttctctattcatcttcattaggccatcctagaaaaaaatatctggagcagatgatctatttccccagtgactctgggggggaagctgagcacctcatgtatatcctttccctctgggtctgattattggtttggcttgagctagtgccatcaggttatacttgtacattttgggagcataaccttgactcaaattgcacttctacgtttagcctggccaaacatgggcttgcttcacttttggctttgttaatcgattcttcagcttccttgctatgaaattgaaatatgtttcccagtagctgcatttataaatgctaattagttattgattcacattattatgatttagccttgtgtcactttctacaataaaaagtgtatacacagtgagtgttagatttcagctataaagcagaaatctatccttttgattaataacacttctatgatacttctactcttctattcctgtaatttaaaatgtttatttcctaatcatctaccatcacctcccctctcctctggtgactgatttcctttgcaggggcttgtcattattgcaccttgaccagtgctctggctgtttctagtggcagtctcttgatattatcagatgtggacaagttataacaacattattcatattgctactggctttcaatgtctgtaaagaaaccatgtagagtcttctgttttgaaaattcttagacgtgtgtcttccagttggcaaaggagtgagctagaagttactccattagcagcacccaggggatcagaggtggtttcagaggcaagaagtttttctaaaaaggttgatagttacttcagtctgcctaaagagggtcctagaatcatgggatgtcactctgttgggcaaatgccaatttcttccctttcctatggattctgcagacacttcgttttctcagaagtgtgatctcagcaacctcaggttggtggaacaaaacgcctcatgagatgtgaacatcttttgaaagaaagattgcagatttaggtgtcagccagacccaggcctggagtctgatctccactgcctggtaccctgggcaggtggccatcatttagattcagtttcctgccttgtgaagcaggagtcaccctgcctgagctgagtcataaggattggcgcaaaacgggctcaacaaataggagccaccgtcaccatcctcctagcccatttgctatatccttgcacaaagtttacgctttttttctctagatgctgggcagggcccacattaagcaaattactgtgctctgcattgtggtaccagaatagatactgtattaattccctacagctgcctagataacaaatgaccacaaactggctggcctaaaacaacagaaatatattttctcacagttctggaggctagaagtccaaaatcaagctgtgagtgggaccatacccccctgaagactcttgggaggaatgcttccttgcttcttccaggtcatggtggttgctggcacccccgtgtgttcttttccttgcagctgcatcactccagcctctgcctctgtcttcacatggcttctctcctgtgtctcttcacatgattcttcctccctgtgtgtttttttgtgtttgtgtgttctctgtgtctccaaatctctctcttcttatgaggacaccagcgactggatttagggcccattcatcttaccttgattaagtctgcacctgttcagatggacataaattttgggggaacgctattcaacccagtatagatacaaggaacttagagttcaggggtgaaataaatatttaaaagccaagtcataaacaaactggaatgaaataaatgccacaatagaagcacaagcaatgaactattgaactcacctaactcagtgagggtttgctttcattgaaatatgagtgaaaccatattttgatgacatttgaatagctacaatgtgctgttgtgggctgcgtgttttcaagagattatttcggggttgggacaaggctcatatgcactcctatttacctccactccttagaagatcctccctcacacacacacacacacacacacacacacacacacacacacacacacatgcacacacaattcacccacgctacactaggacatccgggctctgcagatgactgctacctggatttatacttgtttcttccttctaatggcgaatgtgattttgctcaaggattagagtttaaccagtttgaaatagttcatctctttaataaatacggaataagatggagaaaacgttactccccggagctccagagtgcagaggaaggtggaccagctagatggagctttccccagggggatctgcagggctggagatttagcatggtgttctgcctgcatgccagggggccacacgacgatcatgtgggtgatggcaggaggcacagttgggctgagaggacagaaccatattggtgactctgaagtctttggtaaagtgaccagctttatgagtttgttgtggttgcattcctggtgggaacccagtggaaaggcagagtttgactggcgctacaagatacagaatggagcaggctacagaagcaggagcagagagaagcacaaggccatggcccgacctcaggtgtggagatgctggtgccttgaggcggggtccttgaaccttctctgggcagggaggccttcttttgttagttagtgtgctccggagatactgaatcatagtgtattggtataggctgggaagtccccttcctgcaagctggaggcccaggaaagccagtggtgtagttctagttcaaacccaaatgcctgggaactaggagagctgatggtgtaagtccaggtctgaatctgaaggcctgagaaccaggagtgctgatgtctaagggcaggagaaaatgaatatcccagttcaagttgagagagcaagttagctcttcctctattttgttctattcagactttcaatggattgggtgatgcccacccactctgtggaggatgggtcttctgcactcaggccactgattccaattctaatctcttccagaaagcccttcacagacacacccagaaatcacgttttgccagctatctgggcatccctcagcccagttaagttgacacctaaagttaactgtcatgctgcactgaggacacttgggttaggtataaagtggcttgttcaaatttagaaggaaagcatcttaaaccctaatagatgaaagaggaaaagtccgcacacaactctaggggaaacccaataatacaccaaactttaaaaaaatttctaaatgaagaattaagtcatgaaataggggataagaatttgtgtaagtttgcctaaatagacaaggttcagagagacattatctatagcagcaggggaaaaaaggacccccagagagcatcagatacatacagcaggtgcaggacaggtgcagcaccttccacttccctttgttctgcagaatcaccaacacaggtggcacttactccaaaaggcagatcttatcttgagttcaggcacaagtcaatagcacagaagcagtgatgagtgtctggtccataagaaagagataagtgtgcaacttgggggagagagtctgtcagttcaggtctaagggcaattaacatggaaacgattttagtgtgtggtcaagatctcaaaaacaggaattcagctctggaagaagactaacagaatccctagaagtgggtcagatcgcaggtggctgggggtacaggcagtgccccctttcaagacaccagggagctgtaggtgtgggaggaaactccaggtgcccatgatccccgggtagaatgggccagagaggaagataggctcccctgtagggtagattcagaaagcagctatgaaatctcatccctgaaactgtgaaagactgttaccttctgtattagtttgctagggctgctgtaactaataatgacaaacttggtgacctaaaacaacagaaatgtattcttgtgcagttctggagccagaacttctgaaatcaaggtatcggcagggtcaggctccctcttggaggatctgggaagaatccctctttgcctcttgcagcatctggtggctctaggagtttctgtggctacttcactctaatctctgcctctatcttcatgtggccttcttcccttctttctgtgtcttttctgtttttgcttttttttttttttgagatagggtctcactatgtcacccaggctggagtgcagtggcacagtctcggctcactgcagcctcctcctcccaggttcaagcgattctcattcaagcctcagccacccgagtagctgggattacaggcatgcaccactacgcctggctaatttttgtatttttagtagaggcgaggttttgcctgttgtccagcctggtcttgaactcctggcctcatgttatctgcccacctagacctcctaaagtcctgggattataggcatgagccactgcgcccagcctgtttttgcttcttataagggtgttacaataggtagctagtcagacatgagtagtgcaggagaacaacccccaaccaggaatgtcaggccaccattagatgatggtcaggtggttgtcaaactctctaaaataattggttgcggccggcaccagggaacagcagtctcccaatagatagaaacagctgaaactggtgatcagcagcttcccagtaagctctctaagagttgacctagtgggctcacacgtgagcactaagaggcaaaatggtggcgtttaataggcatgtgactttcctctaggaactctcaactggtaagggaatgactcatcaagtgagcatgcgtacagctttagtaaacacactgcacatgcagcccctcccaagtgctacttccctctgttctacaaaatcaccaacacaggtggcacatactccaaaaggcgtatcttatcctgagttcaggcacaagtcaatagcatagaagcagtgaggagtgtctggtccatgggaaagagataagtgtgtaacttgagggtgagattctgttggttcaggcgtaatggcaattaacatggaaacgattttcgtgtatggtcaaggtctcagaaacagggattcagccctggaagaagactagcagaatccctcgaagtgggtcagatctcaggtggctgggggtacaggtagtgccactgcacatgtggacagcgcaccccaagaatcaagggagaaagaatgcaagatcccagaagtatgccaaggtataaaaccccaagtcaaatgtcaaactgcgcatttgatctctcaagttgcccacttggccctcctccaagtatactttccttcctttctctcctgctctaaagctttttttttttttgagatggagtctcgctccgtcacccaggctggagtgcagtggcgcatctcggcaagctccgcctcccgggttcacgccattctcctgcctcagcctcccaggtagctgggactacaggcgcccaacactacccagctaattttttgtatttttttagtagggacggggtaaagctttttaataaactttcattcctgctctaaaacttgccttggtctctccttatgctttatgcccctcagtcaaattcttcctgaggaggcaagaattgagattgctgcagacctgtacagattcaccactggtaacaagggcactagtcattggattgaggttctgccctgttaatccaggaggttctcatttaaagatccttaacttaattacatctgcaatgacccttttcttaaataaggccatcttcacaggttctaggctttaagacatgaatatatcttttttggggtcaccccaaatgcaggctggggtcattcagccttcaacaccctcccctggactgtgtgccaatcctgttaatggggccaggcacactgatgtctttccctggctcccagagagaggcagggaaacctactaggaagagtctgagactggaaaacaataagtgaaataaagaatgatgcaaatgcctagatctgcacatttctaaacgggtgactgcagggagacaaatcccagaggggagagacaaacatgagaatgttgctgtgttggagaggtgggattacggatgttttcttcttttcaaaatttccgtgactgttgttacattgccattgaattcaataataaagagcattaaaactcatcttttcaatagagaaatgagattgcagcttttggcgctaaatgaatctaggctcaggactgctggcctgtgcatttttgaaaaagaatacactaggggcttgggaaaagcacatcagctggaggagaggaaagaggagtgaggagccagctatttagaatgggaagaagtgacttctccccagcgtgctgcccttcattgtttacagcctttgacttaagtattcagaattaggggttagaaaaccctgcaggaaccaagcttagcatccaacaccccattatttcctccaaacacttatcttctcacctttctttctttctttttttttttttttttttttgagacggagtttttgctcttgttgcccatcttctcacctttcttcctgattccagaagacaagatgaggaagcagggccgtatgaaaggaggatgttttcctaaatgccttaaacaaacccaagaggctgagagttaattttttaaagatgacttgacagcttgttcaccctgtttactgacatcaacaagggagtaagcacggcagacagagataaattaattgaaatgtccctgtagcatgtaagctgcttgggtaaagatggtatccttgtggcgtggctgtttaataaggggtgtgtgtgtgtgtgtgcatgtgcatgtgtgtttaatggattgttgaaaggaattcaaagtcagccgta

SEQ ID NO: 174 - DNA, 2347 bp, Homo sapiens
ggtgtggccgaagctgcctctctggtggcatagctaagaccaagctgcacgcagtgaaaacacagtttgttttcactgacaacaaggcagaatgtgtaccagggatgtgacgtggggaaccaggaagaggacagtctgaggatcattattaaagggactccatccaagaaggtttccagccagaggcaagctgtagccagaagaaaagaatgagagatcacctgaataatagaacagaaactgctgaaatattgaacacagatctagatcaaatgaaggaacatattcaggatgaagcataaataaaggccaggcgtggtggctcatgcctggaatctcagctctttgggaggccgaggctattctccatctcctgggctccagtgatcctcacgcctcggccacccaaagtgctgggattatagaagtgaaccactgcgcctggcctattgaaggtttttaatcttcagagtttcgactttatcaacaacacttagaagccaccaaagaattgcagatggatcctaatagaatatcagaagatggcactcactgcatttatagaattttgagactccatgaaaatgcagattttcaagacacaactctggagagtcaagatacaaaattaatacctgattcatgtaggagaattaaacaggcctttcaaggagctgtgcaaaaggaattacaacatatcgttggatcacagcacatcagagcagagaaagcgatggtggatggctcatggttagatctggccaagaggagcaagcttgaagctcagccttttgctcatctcactattaatgccaccgacatcccatctggttcccataaagtgagtctgtcctcttggtaccatgatcggggttgggccaagatctccaacatgacttttagcaatggaaaactaatagttaatcaggatggcttttattacctgtatgccaacatttgctttcgacatcatgaaacttcaggagacctagctacagagtatcttcaactaatggtgtacgtcactaaaaccagcatcaaaatcccaagttctcataccctgatgaaaggaggaagcaccaagtattggtcagggaattctgaattccatttttattccataaacgttggtggattttttaagttacggtctggagaggaaatcagcatcgaggtctccaacccctccttactggatccggatcaggatgcaacatactttggggcttttaaagttcgagatatagattgagccccagtttttggagtgttatgtatttcctggatgtttggaaacattttttaaaacaagccaagaaagatgtatataggtgtgtgagactactaagaggcatggccccaacggtacacgactcagtatccatgctcttgaccttgtagagaacacgcgtatttacagccagtgggagatgttagactcatggtgtgttacacaatggtttttaaattttgtaatgaattcctagaattaaaccagattggagcaattacgggttgaccttatgagaaactgcatgtgggctatgggaggggttggtccctggtcatgtgccccttcgcagctgaagtggagagggtgtcatctagcgcaattgaaggatcatctgaaggggcaaattcttttgaattgttacatcatgctggaacctgcaaaaaatactttttctaatgaggagagaaaatatatgtatttttatataatatctaaagttatatttcagatgtaatgttttctttgcaaagtattgtaaattatatttgtgctatagtatttgattcaaaatatttaaaaatgtcttgctgttgacatatttaatgttttaaatgtacagacatatttaactggtgcactttgtaaattccctggggaaaacttgcagctaaggaggggaaaaaaatgttgtttcctaatatcaaatgcagtatatttcttcgttctttttaagttaatagattttttcagacttgtcaagcctgtgcaaaaaaattaaaatggatgccttgaataataagcaggatgttggccaccaggtgcctttcaaatttagaaactaattgactttagaaagctgacattgccaaaaaggatacataatgggccactgaaatctgtcaagagtagttatataattgttgaacaggtgtttttccacaagtgccgcaaattgtaccttttttgttttttcaaaatagaaaagttattagtggtttatcagcaaaaaagtccaattttaatttagtaaatgttatcttatactgtacaataaaaacattgcctttgaatgttaattttttggtacaaaaataaatttatatgaaaacctgc

SEQ ID NO: 175 - protein, 244 aa, Homo sapiens
MDPNRISEDGTHCIYRILRLHENADFQDTTLESQDTKLIPDSCRRIKQAFQGAVQKELQHIVGSQHIRAEKAMVDGSWLDLAKRSKLEAQPFAHLTINATDIPSGSHKVSLSSWYHDRGWAKISNMTFSNGKLIVNQDGFYYLYANICFRHHETSGDLATEYLQLMVYVTKTSIKIPSSHTLMKGGSTKYWSGNSEFHFYSINVGGFFKLRSGEEISIEVSNPSLLDPDQDATYFGAFKVRDID

SEQ ID NO: 176 - DNA, 1989 bp, Homo sapiens
gctattctccatctcctgggctccagtgatcctcacgcctcggccacccaaagtgctgggattatagaagtgaaccactgcgcctggcctattgaaggtttttaatcttcagagtttcgactttatcaacaacacttagaagccaccaaagaattgcagatggatcctaatagaatatcagaagatggcactcactgcatttatagaattttgagactccatgaaaatgcagattttcaagacacaactctggagagtcaagatacaaaattaatacctgattcatgtaggagaattaaacaggcctttcaaggagctgtgcaaaaggaattacaacatatcgttggatcacagcacatcagagcagagaaagcgatggtggatggctcatggttagatctggccaagaggagcaagcttgaagctcagccttttgctcatctcactattaatgccaccgacatcccatctggttcccataaagtgagtctgtcctcttggtaccatgatcggggttgggccaagatctccaacatgacttttagcaatggaaaactaatagttaatcaggatggcttttattacctgtatgccaacatttgctttcgacatcatgaaacttcaggagacctagctacagagtatcttcaactaatggtgtacgtcactaaaaccagcatcaaaatcccaagttctcataccctgatgaaaggaggaagcaccaagtattggtcagggaattctgaattccatttttattccataaacgttggtggattttttaagttacggtctggagaggaaatcagcatcgaggtctccaacccctccttactggatccggatcaggatgcaacatactttggggcttttaaagttcgagatatagattgagccccagtttttggagtgttatgtatttcctggatgtttggaaacattttttaaaacaagccaagaaagatgtatataggtgtgtgagactactaagaggcatggccccaacggtacacgactcagtatccatgctcttgaccttgtagagaacacgcgtatttacagccagtgggagatgttagactcatggtgtgttacacaatggtttttaaattttgtaatgaattcctagaattaaaccagattggagcaattacgggttgaccttatgagaaactgcatgtgggctatgggaggggttggtccctggtcatgtgccccttcgcagctgaagtggagagggtgtcatctagcgcaattgaaggatcatctgaaggggcaaattcttttgaattgttacatcatgctggaacctgcaaaaaatactttttctaatgaggagagaaaatatatgtatttttatataatatctaaagttatatttcagatgtaatgttttctttgcaaagtattgtaaattatatttgtgctatagtatttgattcaaaatatttaaaaatgtcttgctgttgacatatttaatgttttaaatgtacagacatatttaactggtgcactttgtaaattccctggggaaaacttgcagctaaggaggggaaaaaaatgttgtttcctaatatcaaatgcagtatatttcttcgttctttttaagttaatagattttttcagacttgtcaagcctgtgcaaaaaaattaaaatggatgccttgaataataagcaggatgttggccaccaggtgcctttcaaatttagaaactaattgactttagaaagctgacattgccaaaaaggatacataatgggccactgaaatctgtcaagagtagttatataattgttgaacaggtgtttttccacaagtgccgcaaattgtaccttttttgttttttcaaaatagaaaagttattagtggtttatcagcaaaaaagtccaattttaatttagtaaatgttatcttatactgtacaataaaaacattgcctttgaatgttaattttttggtacaaaaataaatttatatgaaaacctgc

SEQ ID NO: 177 - protein, 244 aa, Homo sapiens; identical to SEQ ID NO: 175

SEQ ID NO: 178 - DNA, 2148 bp, Homo sapiens
ctgcccgctcgcccgcgcgccccaggagccaaagccgggctccaagtcggcgccccacgtcgaggctccgccgcagcctccggagttggccgcagacaagaaggggagggagcgggagagggaggagagctccgaagcgagagggccgagcgccatgcgccgcgccagcagagactacaccaagtacctgcgtggctcggaggagatgggcggcggccccggagccccgcacgagggccccctgcacgccccgccgccgcctgcgccgcaccagccccctgccgcctcccgctccatgttcgtggccctcctggggctggggctgggccaggttgtctgcagcgtcgccctgttcttctatttcagagcgcagatggatcctaatagaatatcagaagatggcactcactgcatttatagaattttgagactccatgaaaatgcagattttcaagacacaactctggagagtcaagatacaaaattaatacctgattcatgtaggagaattaaacaggcctttcaaggagctcgatggtggatggctcatggttagatctggccaagaggagcaagcttgaagctcagccttttgctcatctcactattaatgccaccgacatcccatctggttcccataaagtgagtctgtcctcttggtaccatgatcggggttgggccaagatctccaacatgacttttagcaatggaaaactaatagttaatcaggatggcttttattacctgtatgccaacatttgctttcgacatcatgaaacttcaggagacctagctacagagtatcttcaactaatggtgtacgtcactaaaaccagcatcaaaatcccaagttctcataccctgatgaaaggaggaagcaccaagtattggtcagggaattctgaattccatttttattccataaacgttggtggattttttaagttacggtctggagaggaaatcagcatcgaggtctccaacccctccttactggatccggatcaggatgcaacatactttggggcttttaaagttcgagatatagattgagccccagtttttggagtgttatgtatttcctggatgtttggaaacattttttaaaacaagccaagaaagatgtatataggtgtgtgagactactaagaggcatggccccaacggtacacgactcagtatccatgctcttgaccttgtagagaacacgcgtatttacagccagtgggagatgttagactcatggtgtgttacacaatggtttttaaattttgtaatgaattcctagaattaaaccagattggagcaattacgggttgaccttatgagaaactgcatgtgggctatgggaggggttggtccctggtcatgtgccccttcgcagctgaagtggagagggtgtcatctagcgcaattgaaggatcatctgaaggggcaaattcttttgaattgttacatcatgctggaacctgcaaaaaatactttttctaatgaggagagaaaatatatgtatttttatataatatctaaagttatatttcagatgtaatgttttctttgcaaagtattgtaaattatatttgtgctatagtatttgattcaaaatatttaaaaatgtcttgctgttgacatatttaatgttttaaatgtacagacatatttaactggtgcactttgtaaattccctggggaaaacttgcagctaaggaggggaaaaaaatgttgtttcctaatatcaaatgcagtatatttcttcgttctttttaagttaatagattttttcagacttgtcaagcctgtgcaaaaaaattaaaatggatgccttgaataataagcaggatgttggccaccaggtgcctttcaaatttagaaactaattgactttagaaagctgacattgccaaaaaggatacataatgggccactgaaatctgtcaagagtagttatataattgttgaacaggtgtttttccacaagtgccgcaaattgtaccttttttgttttttcaaaatagaaaagttattagtggtttatcagcaaaaaagtccaattttaatttagtaaatgttatcttatactgtacaataaaaacattgcctttgaatgttaattttttggtacaaaaataaatttatatgaaaacctgc

SEQ ID NO: 179 - protein, 172 aa, Homo sapiens
MVDGSWLDLAKRSKLEAQPFAHLTINATDIPSGSHKVSLSSWYHDRGWAKISNMTFSNGKLIVNQDGFYYLYANICFRHHETSGDLATEYLQLMVYVTKTSIKIPSSHTLMKGGSTKYWSGNSEFHFYSINVGGFFKLRSGEEISIEVSNPSLLDPDQDATYFGAFKVRDID

SEQ ID NO: 180 - DNA, 2203 bp, Homo sapiens
ctgcccgctcgcccgcgcgccccaggagccaaagccgggctccaagtcggcgccccacgtcgaggctccgccgcagcctccggagttggccgcagacaagaaggggagggagcgggagagggaggagagctccgaagcgagagggccgagcgccatgcgccgcgccagcagagactacaccaagtacctgcgtggctcggaggagatgggcggcggccccggagccccgcacgagggccccctgcacgccccgccgccgcctgcgccgcaccagccccctgccgcctcccgctccatgttcgtggccctcctggggctggggctgggccaggttgtctgcagcgtcgccctgttcttctatttcagagcgcagatggatcctaatagaatatcagaagatggcactcactgcatttatagaattttgagactccatgaaaatgcagattttcaagacacaactctggagagtcaagatacaaaattaatacctgattcatgtaggagaattaaacaggcctttcaaggagctgtgcaaaaggaattacaacatatcgttggatcacagcacatcagagcagagaaagcgatggtggatggctcatggttagatctggccaagaggagcaagcttgaagctcagccttttgctcatctcactattaatgccaccgacatcccatctggttcccataaagtgagtctgtcctcttggtaccatgatcggggttgggccaagatctccaacatgacttttagcaatggaaaactaatagttaatcaggatggcttttattacctgtatgccaacatttgctttcgacatcatgaaacttcaggagacctagctacagagtatcttcaactaatggtgtacgtcactaaaaccagcatcaaaatcccaagttctcataccctgatgaaaggaggaagcaccaagtattggtcagggaattctgaattccatttttattccataaacgttggtggattttttaagttacggtctggagaggaaatcagcatcgaggtctccaacccctccttactggatccggatcaggatgcaacatactttggggcttttaaagttcgagatatagattgagccccagtttttggagtgttatgtatttcctggatgtttggaaacattttttaaaacaagccaagaaagatgtatataggtgtgtgagactactaagaggcatggccccaacggtacacgactcagtatccatgctcttgaccttgtagagaacacgcgtatttacagccagtgggagatgttagactcatggtgtgttacacaatggtttttaaattttgtaatgaattcctagaattaaaccagattggagcaattacgggttgaccttatgagaaactgcatgtgggctatgggaggggttggtccctggtcatgtgccccttcgcagctgaagtggagagggtgtcatctagcgcaattgaaggatcatctgaaggggcaaattcttttgaattgttacatcatgctggaacctgcaaaaaatactttttctaatgaggagagaaaatatatgtatttttatataatatctaaagttatatttcagatgtaatgttttctttgcaaagtattgtaaattatatttgtgctatagtatttgattcaaaatatttaaaaatgtcttgctgttgacatatttaatgttttaaatgtacagacatatttaactggtgcactttgtaaattccctggggaaaacttgcagctaaggaggggaaaaaaatgttgtttcctaatatcaaatgcagtatatttcttcgttctttttaagttaatagattttttcagacttgtcaagcctgtgcaaaaaaattaaaatggatgccttgaataataagcaggatgttggccaccaggtgcctttcaaatttagaaactaattgactttagaaagctgacattgccaaaaaggatacataatgggccactgaaatctgtcaagagtagttatataattgttgaacaggtgtttttccacaagtgccgcaaattgtaccttttttgttttttcaaaatagaaaagttattagtggtttatcagcaaaaaagtccaattttaatttagtaaatgttatcttatactgtacaataaaaacattgcctttgaatgttaattttttggtacaaaaataaatttatatgaaaacctgc

SEQ ID NO: 181 - protein, 311 aa, Homo sapiens
MRRASRDYTKYLRGSEEMGGGPGAFGPLHAPPPPAPHQPPAASRSMFVLGLGLGQVVCSVFFYFRAQMDPNRISEDGTHCIYRILRLHENADFQDTTLESQDTKLIPDSCRRIKQAFQGAVQKELQHIVGSQHIRAEKAMVDGSWLDLAKRSKLEAQPFAHLTINATDIPSGSHKVSLSSWYHDRGWAKISNMTFSNGKLIVNQDGFYYLYANICFRHHETSGDLATEYLQLMVYVTKTSIKIPSSHTLMKGGSTKYWSGNSEFHFYSINVGGFFKLRSGEEISIEVSNPSLLDPDQDATYFGAFKVRDID

SEQ ID NO: 182 - DNA, 35306 bp, Mus musculus
tggccctatcccaggtcttcctatctgctcagcacttgtccctctatctccatccatcttttgctttcacacattccaccttagatgctttttgtcacatctggtaagcgctctctctctttgtttctggccagaggttccagggctgagggtagcctgaaggtggatgattgtcattacaatgatccatctgatgacctcagaagtcttcagtcccttagccctctcctcatcctatggtatacacttacttttgtccacattttatttatttttaaaaaagatttatttatttactttacagtacactgtagctgtatagatggttgtgagctttcatgtggttgttgagaattgaatttttaggacttctgctcactccggtccatcctgcttgctccggtcggccccgctcgctcagtccctgcttgctttggtccaaagatttatttactattatacataagtatactgtagctgtcttcagacacaccagaagagggcatcagatctcattacaggtgattgtgggccaccatgtggtggctgggatttgaactcaggacctttgaagagcagtcagtgtgcttacccactgagtcatctcgccagcccccacattttataaattatacttcagaataaacctgcccaagacttctcatgagctgaggccccaggcctaaccaacattgtttaataatgggaagggtaatcaagtggttgtctgctggtggccaagactgaaagctagtagggaccctatcagagcttgtcatcctgcatattagagatgttcaggagcctcccataaggagctggagcatatgacattcagagagccagagtagaggcctgatggggaggggaccctgatggcagggcaggaggtctaacctcaacactgagcacagacgaggcaggtgggagttgtcttcaccctccctttcagaacaggaggttcagggcaggcctggagaagctgaatagagaagccttgggggagtggcacccatcgagtctccacctgcccaacctgctggtttctggcactaccagttatgtgagcccaacagtagcatgcagtagaatcctttaagcccttaacaaggagaacatggagtgtgtgtgtgtgtgtgtgtgtgtgtgtgtgtgtgtagggaggttgctactctgggatccttaggtctgtgttgcaaggtaacacagggacatgtcattgagagcagatgtggggggtcagagtgataaggagcctcacccctgggcaggtacagcccatgtgtgaatgaagcaagggtcctgggcagagtttctctgccttaggccgggggtgggtaggttcttctatcactgataggtgggtggatgggtgatcatggtttgggaactttccccctctaatgaattcagcaagggggactggggccaacttcatctggtgaggtgtgaagacaggcaggcttaggaaaaccaggtctctgtgaggccagagtgtatcgcagggaaaggagtaggtaatggggaagggtcttgctaggggtagctgcaaccctgctccactgcatcctgccttctgtgagccaagccaagttgtcccttgtacaactagaatgaacattgggcaaagagggaaacccctgggtaagactggccccatagctgtgggatagcccttaccgaccctggcatcttctttagggttgccatgggtgaaatgggttttcctgggtgtcccgaaagtccttggatgggaggatatgctatcctaggaggatgtgggatagcttttcctagggcaggcagaaggggtaattcttgatttgctttatgccttggggtaggaggctggctgcccttttaaagactttagattctgcaccaactacttatcttcatctcaaagagctccaggggtgcagagtctcagcagggagttctctcctgagagcagtgatcacttatgctgcccattatattcagattccccaactttttttccaacccggaaagtggaataccctggtctgatcaggctacagctataccaggctacggtaggtaggcacatgtagggctggaggaagcctagagttctagctgaggctcttgtggcttccagatgatcgcacgtgatggcatacaggacagggccaggtgtgctcagatgagtatgggtcccaggttgctgagtgagagttcctgtcttgctgtaggcatgtgttctttctgctgggtgagatgaggcggtgctggcataggggcctgcccagccttgctctgacccagttttccaggcccagcccagttctctgcacccaggcaggcatggagcagtgggagctcacaggactttttttcaggaataccaatgtcctggcccacagtcactttcccgtctggggcatttgactggctggccgtcagtacagttagtcccccaaggacacaggcatccctaggacttgagttgccaatgatcctaccagatcctgctttggaatcatctgttctgtgcctctgcctccagatgaactgatgcattgcccagagatagaccctgtagccctctaactaaagatccagtagtgtttcctgccctcctagaagccagttatggccttcccaaagatggggtcccttaggtgacaggtagcttcagaacaggccacagagtcacaagagtgggtataaagactcaggaaaacattccagggaaggggaggatgggaaggtccttgtggacacggagactggggcagcaaaggctacatgaggcctgttgggaagtggggagggggagggagggtggatgtgactgtgggaatccagctctggtagctgctgggtaagccgctttgatccacattgaggcaacacagaccccagtttaagataacttgggcttgggaacctgggctctggccccaactgcccttctgggtttcatccctgctctgcaccagagagacactagtctgggtggtgactgactctctgggcaggctctcctggatgctggggcatcgttcttttctgttttttttttttttttttggtttgtttgtttgtttgttttgtttttccccaagacaggtttcactgtgtggccctggctatcctggagctcactctgtagagcagactggcctccaactcacagagatccacctgcctctgtcttctgagtgctgggactaaaggtatgtgccatactgtggagctggggcacggttcttaagctgtgctggcaggacaacttgaggcccatcagtttccaaggagaggggtgtggagtgcccacctcaggaacagataggcctccccttgaccctgctcctctgagttaaactttctgtatccctttctaatccgctgttagcatctttgacttgggcttgagaggtcatgggatcctctactccctagctggggccagaaggacagcctagtttgagcagaggtcagcatggacacatatgtggactgttgggggtgtgtacactgcctgggaaccccatatcagactcctaacctttgcctcagccatggtcagtgccttcccaccccagagggctgactcaactcaccctcagtccctatgcaggccaggccagtggacaataaagctgtcagcagccagggcgaggggcaggcaatgggcgtggctaggaggagagggcctccagaagcacagacatctctattaggggatgtagaccctgcctgtccatcctactcaatgctgggaccttggaggctgggagcaagtggtggctcagagagaagaggatgaccagaatagttagcaaggtcaacaaggacttgggagtcatgtggagacaggtgtctaaggagcaactgcctgcccactcctcaggtctattaatgtacctgcaggacatgtgccctctgggtagaaacattccaggtgaacactctgtttagcctataaaaagaccctaagaaaagggtttctcagagaaaagagatagtcacagaacatgccttagctttcccgcctgtgatggggtagagacagacaccactgtgtacctaagcatcagtcagcctccagtggagtccagcagacagtagaagcactttcagatgtggaccgaagagactgaagagggaagtggcctctacctctgtcttcccccgcattcaactctcaggtccactatgcctgctttgtgaactggggcagagacccaggtgataggcacggctcgattctgctggagacttaggagctgagatttaggcctatgacccttagatcttagctgggacactcctggaaagtgaggctcctgaagtggctatgggtcgtgagttggcagcctctatctggtaagttcactgcaaacagctacctcttccaatcagctgtaagcagcctatgtgtttgcatctcctgcatcctccagggtcccccagcatccccagagtcttaccaggctttgtgggtgggctggtccctttcctcaggctaatgaggcacctagctcagggctgctgaggtctccactgctctgagagctccctaaccattgcactcttcccaagctcagttcaaacatctctggaagccatgtggtcacctctggtgactgagtaactgggacagtgcctccttattccccatctgtcaaatggagcttctgtgagggttctttcaggaaccaacaagactaccaacttcacgttctgaacacacaaggacctggattacccaacccaagtcatctgcgggaggactcagaacttaacagcatatgtgcaggtgtttgcgcgcgcacacacatgccgccccagctggctgctctaaacttagagaatagagctgaatgcttggctgaaggtcgcacagggatgatgagtgagagggccaaccagtagagggggacagagcaagactgccataggtgatgccaggaggggccagtgactgagaagggtgcagtgtaatagagagccactggggtggaggaagagggtgtggcaaaggctgctgggccctggggcctagattcctagttctgctggagcctgcagagttagaacttgtttattcttggcaggaaggctagtcctggggggtgggaggggggcaaggccttttcaaaaaaaaataaataaaacattcatttagaaggctcccaaggcatgctgaactgcaaaagggtcctggaaaaaatgccgagagggtttaagtgtaaatggacccaaaacaccataattaaatttcccttaaatttaccagagtttggggtcaaagaaaaaataaaacgtaaggaaaatacacttgaggtttcaggccaagagcttaggaaaatagattttctgaacggctcagcagctaccggcctggccctgccagtccctcgggttgtcgctgcctcacctcctctctgctaggcagtgccctgtgcacatgctgttcctaggggctttcgaggcaccctgattgtccctttgtcagctcttccagctttctgctgtgtagctcgtctttgtcagcttggtagccttgcccttaccccgcatctctccacagctctggtctctgatctttacttgtccaggcacattttccagaccaaaaaaagttaggacctgaggtctagtggtctgaatgaacccaggggcaaaaaggccagcaagtgtggtctggaatatcacagcacacccaggctcccaatgcatgattcatcttattgcccttctcactcaacctgccaggaaggtcacagctaaaattaaggatcttacatagtagctagtattggctgaaggcttttggaatattttctcttcttgttcatgttcttaaaaaatccagccaggcatggtggcgcatgcctttaatcccagcacttgggaggcagaggcaggtggatttctgagttcgaggccagcctggtctacaaagtgagctccaggacagccagggctatacagagaaaccctgtctcgaaaaaccaaaaaaaaaaaaaaaaaaaaaaaaaaaaaagaatctttgggctggtgagatggctcagcggttaaaagcgctgactgctcttccaaaggtcctgagttcaaatcccagcaaccacatggtggctcacaaccatcgtaacgaaatctgatgccctcttctggagtgtagtgacagctacagtgtacttacatataaaataaataaatattaaaataaataaataaaaatccatttttttggttatattataatgggcaaatcaaatgtacttttattttaatcctcaaattatgagaatgaaattgaaaggcacaaattacccacacactttcacagttgcatcaccattcaaacctgctccctgtttcttctttggggaaagccggtcaggccggtcctctaagacagagttctgagccccttccccatggtgctgcactggctcctgagcctgtgggcacatagtaatggtgtttctcagtagctgaaggaatggggactcctaggaagagacagagcagctctagtctctgaaagtctttggcccttcaagtcaggccatggagtccattggtgctcagtttccctttatccctgcactcagcctcatgggcagctgcccctgttgaaccaggcactctccccgagtgtaaccttagcaggctcccatggctccctctgcctgggttccaggcccactgtggcctatagtagctgccacctgccagaaatcccgtgggtaagaggtaagttgtgatttcaggtctgaccaggagaaccacccccagctcctctctgctgacagtttctcacaaccatctcacagcctcagccctggtctggctgcggaggtcagggaagggcaaatctcagactacctactgccagcctgagggattccattccaggacaggcgcagctggtgcctcaccgcagtctctttccttgttgcttagcagcataggccccagaaagcggaagctactgagctctgagtccctgagctatctatccctagtacgcctgacttggcctctgctctcaactcatgttcactgaagaaggctccatttatgtgagccttggaaagctggtgggtcccctagcagtgggcaggaggtataggcatggaaggggacttgatcattaggaaatgcccagtcatcagcactagctgttggcaggctccaactcttgtcccctggaactctgtcatgggccaaagagaaccacctcctcagatcctcattataacaatagcctggagttcaactgaggggcttgggattaaatagtggccaagtgagaggcagcatcatggagatttaagggctggcaccatcctgcactgatgacagaatggtgggtgggctcagcctcatcttgtgtaggtctcagagaagcaggtgaactcctgctgaacctactgacttgggaagaatcacttcatataagaaaatcccactgaaaacagaccatccttccaggaattacatcccggtatcaagggcaaggcaagtgagctgcggctactcgggctgaacacagggatcatgttgacattagctcctgcagaatcagtggagtcttagaaatgctatgcccctttgatgtaagggccaccagacagtggcagccatgttggaaagtctattaacacccaggccatatcaggatgtacatgatgtcaagggaccaggaactgccaggtgtgtagtgggcagaaggtagctcccccaaaggcaggtctctgtgctatctcccggatccacaaatgtgaccttatttggaaaaagagtcttgcaagcataacgatgggaagaggcttgaggtgagaccatcttcactttatgaacaactctaaatccaaccacaagtgtccttatgcaggacaggagacgtggggaggatagaaaaggcacagaagccatgggaagggagaggcagagactagactgagatgaccgtaagccatggatgcctgcaggccccagagttataacaggcaggaagaagcctactcagggcccacagccagcccaacttgacctcagacttctgttgtcctgaattgaaaaagtaaatttaagacaaccagattttaatctggaagtcggctcaatacaggaatacaagttgtagccgggcgtggtagcccacgcctttaatcccagcactcgggaggcagaggcaggcggatttctgagttcaaggtctgcctggtctacaaagtgagtttcaggacagccagggctacagagaaaccctgtctcgaaaaaccaaaaaaaaaaaaaaaaaaaaaaaaggaatacaagttgtgaatagttgtgaacaccacacagctcatttttaatgaagggggctgattcccccccccccactgctgcagttgagcaggggtctacaagagctggccagtgtaaggccacagggttgggggaggatcagaggagtgggagtaccctgcttagagtcctctttcctgcatgtgtagcccattggaaaacaaggtagcttgagagagatggtctgttgggccatggggttcagagaacaaccaacactggcctgagattcctgactgggtatttctaacaaggaggtcatctcagaaataaagaagtattgctgtttggatggatgctcagctcccagttacagagtgtggagggttctgataaatcctccagacgaagggcgtggaaataggggtcagagctcacattctggttcatttactgataactaatctgccaatagattaggggagaatgtctgctatgaccccctggggtggcatcctgggagaggacctgtgggcagctgcctgggggtgccatgggaacccaggactggattctagccagtctgcagggaggggtccttggccagagcaggagtaacagtaggcagagctgcccagctctagggtggacacacagggatgagagcatgagggttctggggccagggctttccctgctcagctatctgggaaagataagggtgatgagtaagccagtgaaaggtgttcgtaacccacgagccattcccccccccaccccccccatgagcagttttaagttcttcaagccacatacagccagactgggcagaagcactgagccaggtccccatgtatctggctcccataggcttcatcagaccttgtggaacttgtctgaaagtgagacaaggttccctgccttgtgagggtagagaggccatcagtcacagggtggttgctgttacagaagttctgccaggcaggacctacagcttgccagcatgatggggtgaccaggctgatcctccagggaccagctgtcattgtgacactccccagatggaatgtgtcccacatgatgggcgtgctgtgctaggacatccataggttggagttcaggcagccttagggtagggcaggctcccctgctttgtatccccagctcttctcgctattccgagaggctgggtaagtttcttccaaaacctgtgtgttcttggggaagtgtggacatcgttcctgagcaggatgcaggcagctggttagtttgataaatacagcagcgtgtccgtcttttctagggtgcaatccctgggtctttcatcatgtaaactctgctccatccttcactggaagacctgttcacacgtatttgtatttgtcttcctggaactgtcaggctttgtacctgaggatttagtgctctttgcacagggttcattcagctcagggggccagttcactgtgaagacgccctaacacctagacccccaccgaagtcaaccttctgagcccttgagcacagctttattggagggagaagcgtgctggtagacagtcctgagctcggcattgcttcaaggggtcgagcgtgcgacccttgcctcgcctgctccgccccagctgggctcccacgccctctgggaccgcccggcgcccccgcctgaccacgcctcttcggatctcccgccccctggccgccggggaaggggagtgttcggggcgtggcgggagcaccccccaacccccgcccgggctgctgcgcgccgggcagccccagttcagtgcactgtggcagcgggggtggcgggagcagctggcgccgtgcgatccactccggcggggggactcagtggtgggcggccggccactgggacagaggagaccctggaaaagcgggccgagagacggagccgcgcgtggtgagttgggctctagcggccgccaggttagtgtgaaggactcggctggcactcggaggttccgggcgggctcagaagcagtcagggggtgagatatgcgggaagtggagcggttcgtaagtgcggcgaggccggggcaaggcgcgggcttcccgctctggaaagtttgcggctactgcctccgtcctgggagggctctgcggcaaccagggagggaaggaggagggaggaaccgcggctgggaggaggcggccggcgccaggcagcccgggagagagctaggagtcggcgggcggggcggccgggggtcggggttcaggagcgaggccgcgcttccccgctgccctccggagtaactcagtgctctcctcctgtagtctccacagaggcgttctcccaccggcgccggagccgggcgtggggggttgcagcatgcccgcgcgcgctgcttgaggacgccgcggcccccgctctggagccatggtagtcccggcctgcgtgctagtgttctgcgtggcggtcgtggctggagctacttccgagcctcctggtccagagcagcgagttgtgcggagagcggcaggtaaggactgacccaaggtgttcttctgggggccggccctgaatcacaggggctttggcaatggtgaacagcccttgggtgaggaaggggcgtcgggttgattagcaccacaggggctagtgcgccgaggtttgtcccctgccccgcagatcgctgtcagctcggacgcggcagtttataggggtgtctgtaggctgggagccaccacccaagtgcgaggcgtcacgtggaccggtgcccgtgacggtggtcccaggcagaggggcgttgggaaggcgcgcgagctgacttcccacgattcctattgttgcttctcgaatttgagaggaggaaaaatgcctgttattgattcagccgttctcccggaacagttcttcctctgcttcagctaaaggaaggctggacgttgcggggtggatagtagtatcccagccaaagctcagcttcagggtttcgcatgacaaggtgacagcttcagtgcggctgctcccctcttatcctgtaggcggcctgaggggtcggttcccaggggcgcgcacagactgcccttcaggccgcacgctgggagatgaggggcggttgtcccaggatcttggcgccgcctaggtagtcccgctggccaccaaagtccgatgggacacttgaatgccctcaaacggggcccggaggccaaggatgcgaaagggagccacggtccgctctgcgtcccttggttgcccggaggtgcgacgcgcgcggcccccggctgtgcccggtggcagcgtggcaaagcagagcagcggtctggcgggaggccgcgcgaagggaggctttcgctcggtaagttgtcgccccacccgagctgaggcccgaacagccgctcctttgtacctcggcggccacaaaccgcgcattgatggcggcgcggcctctcggggaggtgcgagtgcggcgggcgcagcgggaggaggcagatggcggtgtgcccctcccggcgcccccgcgcccctctctccagcggctgcagcctcctggaacaatgtcattttctttctttctttctttctttctttttttttatgaatgaaagtgggccgggaacttgaatgtgcgtgtctttcagcggcgtgacagaggcggtcgggaggtcagcgcgcgcttttagcgcctgctaggactgccctgcttcccgggtgccgaatggcccgcgaggagaccacattagcatgtgtattcagatgaagatattacttcttgcgtcgggtgtcagtgagctcgggtaggggcggcggggcggagcgcacaccctctctgtgcctcaggcagtgacggtggcctcctggcacgaccctgctgcgggaaccgaagctgagccgggccgcccgggatcggtgggatcgcccgcccctcgcttctgcgtttgagcttgtgagacaggtagggaattgataggccaataaacttaatccggttccttaacgagatgggccgggctgtaaaaatacaaagacctggtgaagtttacagaggtccgggctggcgctttccctaggaacataaattaccaagcaggagctggctggggtcaagggctgtgcggcggggctaggtaccggcctaacctggccacccttggtgaggcaagccctgctggtgtgcttagtgtgggagacagtaacccttaggggatccagaagttgacccccaggccggcttgcagaagcagggccttccaccttccttgtctccccccaaccctaccttgcttgcaaggctggactttgagccctgctggccctcccagtggttcattaacctgggctgatcttagaccctgaagctttggctcctatgctgagcctagaatccccttgtcctccaggtctcaggttttacttgggacctggaactctccccccacccccttttgtagttgggcctagaaggaaaactagttacccagggtgtgttagggggtagatgatgtattggatagaggtggcctgcccggttgagaaattactgagctgtgaacaaagccacttggggttggggcctgcctcggcttgggtcctctcctagaacctaagtctcctcacctgtcctgctacagaggactggtaatggcagggttgttggggggattaaaccagataatccccggtaagccctcattagcccgcccagcctctggagttttctttcattcttcctttcttgacttttataataaactgtggaaactggaatgtctcaaggtgggatggtggggaatggggaggaggaaggcaggcaagagacccttggcttcaaggccccttggggcaggcaccctcctttctcttgggttattttcctcatacacctggccatacctcccacaccagctgtgttcactatcaaagcaggtgtcactcagatctgtgtcctggttttgctccaaagtccaagtcgagttctttagggtgaccaacctcagaccagggttggatttgatgctggttttgtagtgcgcacgtacgtctcaacaacagaacctaggctgtcagctcctccaggcagtggatgcagcccttcctccagctgggcagctgtggtctcactccattgtttgactcagggggcttctgcataggcacccctcattcctacaccccttttacagactttagacacttaaccagggctttctggaccttaggtctgcaagttgggatttgcactttgtgctgtagtggatgaaaccgagacaatctaggaggctctacgcccagcacaacttgattgggatacagtgtcccttagcctgcaacagtgagcctacagtacctaggtccatgttagtaccatatagcaatggggataggtgctatgggatccatgtggtagggacattgtcctcttaaagggcacaacagaagtaccagtgcttgcgtgctgcgtttggctcctttgttgatggggcctagggagttactggtgcacacctggaggctgatggtgtgggagttcctctgaccagggcattgcttctactgcctcagaatacaatattacatattctgcattgtctcaagcactgtccttcccttatccctacctgactcaggtcataatttcctctacgccctgtgaccctagaatggtggttgttggtagatgttgttacccaaggcccccaaagtccaggtgtctggtttcgcctagctcctaatggacaagatggatgggtggatcaaaggttagctctttgagctgactgaacatttcccctccagccatctgcttctccaagggtctggtttgggagctgccatgttcttttccagtccctctttggattcggttaaagcaaatacttgtgtgcatggcttgagcggttgtcttgcccagaccaaattggaaccaactggctgttgcctttgggccaaggcctggactgaggctcttgaccagcctgtccttgcccttctgtggagggagaactcaagtggcttccagcactgggtggtccccataggacatggtagcaggattggagaactggaagtcaagacagttaggcccctggctatgggacctccatagggcagcttaatactgtggggctctgaaggacatgagctttggggatattttagggatattccctctgtctgtcagaatcctggtggactttgagcctgtgggttgtctctgggatggacagaattgggcctaaggactggtgtggccagagtggacagctgggccttgaatctaggccatgcgtcggcggaatgacaagtgacattatagccagtccagctggatctgaggaaggaggtctgcttagcaggaccacccactcctgtcctgggccccaagcccagccgccctgtgatgggcattgtcaggttctggcagggaggcctggaggagatagcccagctggtggtacgtccctgagggtgaagtctttgagccaccgcatgagctgggcagcacctgggcaaggcagaggtgtattatctgtgtccgcctagtggaggagctatgttgcttcagttccttagccctcagggtgggtggctggctctacttggctcacatgcccactcagacagtccccctccccccagtcctcatttgtgaaatgggggtcccatgtcctcagccaacctgtgaactcaggagtctcatagcccactgactagaggcctaagagaccagaatggtgtccatgttttcctagctggctcatctgtgaaatgggtgttgcaaggcgtggactgtccaagcatcccctagctggtatactttggtctcaagaggtgcacaactcctatgaacagcagccctaggggtgtatgccagcaagggctgctcacccatgttcttgtatgacctcatgttgtcttctctctttccatttattttgattttgtttttaagacagtagccaggctggccttgagcttgtagcaattctcctgcttcagacttctgagtgcatgagccaccatacctagctttctcttcctgtttaaagtatgttctgttccctggctctctatccaaactggtttagaagccaagatgagggttgggtgcaaagagggttctgaaagggctccctattctttctctgagctttgagccaaagtccagggaaggacagcctgtctccaacctgcttttgtgcctccctgtgagcttagggctgattttacatttccaaatggtggaaggatcagaggaaggagaattggtgactttttcgtggtgtggggctgagctcagggcttcaggcattctgggtaggtgctgtaccacagagttgtctgaaacccttcttggcactttaaagatgattcaggtatcaggagggctgtgcctctttcagatcatcttgggaagacagcttcctcctgtagggcagagccagaagccttagcccatgattgacagagctgagatgctggggcccactggctcttacgaaaacagttttccacccctggtttgaacattgtctggcaggcccccaggctccaggagcacatccctcacctgcctacatacagcccttgcttgtgtgtttgcaaagtgaagtgctgggtctccagcatgcttctctggagaccctgtttcatagtgtcccatttactccacagaggttccagggcctgaacctagccagcaggagcaggtggccttcggcagtggggacaccgtggagctgagctgccatcctcctggaggtgcccccacagggcccacggtctgggctaaggatggtacaggtctggtggcctcccaccgcatcctggtggggcctcagaggctgcaagtgctaaatgcctcccacgaagatgcaggggtctacagctgccagcaccggctcactcggcgtgtgctgtgccacttcagtgtgcgtgtaacaggtaagtgcttggtgggtggtgctgcaacgtgtgtgaaacagctgtatagccaaggagatcaggacactcctgggctgggtggctgcagcatccctggcctaagatgttgatagctgttgatagaaaggagggggtacccctaagtaggtgccatctgaatgaatggccttgtaaaggcaggatcctaaaggtatgagagtggtggacctcagatatgggaagcagcaggtctttggatataggggtatcacagaacccccacttggaacttgcagatgctccatcctcaggagatgacgaagatggggaggacgtggctgaagacacaggtgagattagagtctatggccactgagctggtcagggccgggatgcctctctggtggttagaagggaacactgctacaggtgggtagaccagaggacagtgctccaggagcagggaggaggcagggctggtctgcagggacattgctattgactctagtaggacggggcaccacaggggtgaggatagccagggatgcagctcagattgttgctgaggaacaatagatccagggatgaagggcactggtggttgttggttcaggccggcaggaggggacagtgcttgtgtgtgctgaggtgtacattgtgaagaggacgtgtgtgtgtgtgtgtgtgtgtgtgtgtgtgtgtctatgcagactgagtacttgggccatttggagacttctggggaagagtggacaaggtgtcctccagtggaataaaaaaaaaattggtgggaaaacaggactgagtctctggtgtgtgggggcaaggagagtgggtacaggggcttgtgtgagattttagagtggaatcgacacaggaacctagcactgacgccaacagaggctcctgtcctggggagtcatttggcttctcatttccctttcccctttggctaccaggttgttgagagcaaaatttctaagccagttttcccctcccctggctcctgcaccagccatgttaccagtggccttgccctgagtttgtgtccacttctgcctccctggttttcccaggctgcatctagtgcttacacaccccacgtgggcttcggctctgaggtgactaaagggtcatcttctggaccttgcctgggcatgggaagcattggctcactgccgtcgctgagtgtgccaagctaatggccgccctgggagcctgggagggcagctcagcatggagggttccctcaccagcgtatgcagacggttctctccccctgtgctgtggctcctccacccacagatgcacatggtcctatggtagagtgtagtgaggtcactgcagaaggggcctgcctccctagtctgtcctggatccttgctctgtccctcagctgtttcaggagtcccagcagggtggcttcctccacccagcccagaggaaccagagcgctcagtggggggaaagcgcgacctaaaggaagcaggccaggccctgggtactgcagaggctggcttggggtttgcagactggtgggatgacctggcctaggccttctaggatctgcatcctactgggatctggggacctccacttgtgggcctgcacccaagggtgaggaggagataaattcagatctgagagtagggcaactggtaatgcagtgtccaggctcaggcaaagcaaaggactctgaatccagaagggtaaacaggctagaggcaggcaggggaggttctggaaggcactggttacagctgttatgggtacttctgccatcaggggctccttattggactcgcccggagcgaatggataagaaactgctggctgtgccagccgcaaacactgtccgcttccgctgcccagctgctggcaaccctaccccctccatctcctggctgaagaatggcaaagaattccgaggggagcatcgcattgggggcatcaaggtaggtctgggaaagaaaggggcctgggggcaggggctggagacaagggatagtctgcatctactcacagactaactacctgcagctccggcaccagcagtggagcttggtcatggaaagtgtggtaccctccgatcgtggcaactatacctgtgtagttgagaacaagtttggcagcatccggcagacatacacactggatgtgctgggtgagggccaggccgggtggctaaggcaaggggcatctctgggtcccttggccctactggccctgacctgactgcctcttgcagagcgctccccacaccggcccatcctgcaggctgggctgccggccaaccagacagccattctaggcagtgacgtggagttccactgcaaggtgtacagcgatgcacagccacacatccagtggctgaagcacgtggaagtgaacggcagcaaggtgggccctgacggcacgccctacgtcactgtactcaaggtaggctctatccccggctggtggctggcagggtgggtggatcagctgggtcagccctggccttggcccatatgtccctcttggctgaaggatatgttgggatttaccaaggtattggaacttctgagaaggggcagcttagttccagtgcatgtcacctgctctgagctctaggcaggctctgtgttacttgtgccctgctgtgggacttgtctgctccgaggactgagcctgcagaagttttctcttgggtaacagttatggtggctcagggcaggaggatgactgctgagttagtaccctctggaccccaggggactggctagacactctccagctggcccggattggctggtgtcatctgcttgcatttagcactggctctgtcctgcccctccctctgcctgtagcaagttccatacccgagttcaggactttgcgatactggaagcccaaagaaaacagctgttgagagacaaggaggtctggttggggaaaggaatagggattgtttggaacaggaaccctggctgttgagaaagaggccactggggtcctgtctgatgcgtctcacactgtgggcgtggatgttcacgagaataagctagttgccctaaaaagatccctggggtgagagtttagaggctgtgggttacaggttttctctctctctcttccccttcccccaacccccgcctcctccgttctctgtgtgtgcgtgtatgtaagcgtgtatgtgtacctgtggtgacagacatggagagaaggcctctttctgaaaccacgcccaccactgccatgacgtgcctcctctccaggcggctttccaggctttgctgcccagcccatctttgggaatctcccttgccctgcctcatcctcacatccttccgtccttccggagctggctcggggtgtgcctgagcccagtctcttgtccccgcagtcctggatcagtgagaatgtggaggcagacgcacgcctccgcctggccaatgtgtcggagcgggacgggggcgagtacctctgtcgagccaccaatttcataggcgtggctgagaaggccttttggctgcgtgttcacgggccccaagcaggtaacgactctgtcccatgcctgcctggcacgctgagctccagcttcaatgcccccagccgtgcacctgcctgcatgccctgcacgaactgccctgcttgaccctgcctgtgactccaactctacttgtgatgcctcaacaatactggtagcccccagttaccactgactgactgtttgcttcagcgccccctccccaaaggcctgtgctgttctcttgcatcccccacttgcatactcagaagatctgtagagcctattaggggccacgtcctgcgttgtgtgtgagcatcgaccttacacccatctccagctggctgatgccttctggcttcctgtccatccatctgtctggcccatcttttcgtctgcatctctcctgtttctgcactaattctgcatgctgcctttgtgtggcaccgtgctgcccacctgcctgttgctcaccttgggacagaggactcgccactggtggagggactggcttcaggctcggttgcctcagtgcaggaggcagagggccctgggcctctgtggctgtggcagggccatggtggtggccgaagatgtggtggtggcggcggcgttttccttgcagcctggctggatcatctccatgtgaactgctatggtacccaaagggaggtgctggcactcgcctatcgcgctctgttctctctttgtagactgcaggcgctaacaccaccgacaaggagctagaggttctgtccttgcacaatgtcacctttgaggacgcgggggagtacacctgcctggcgggcaattctattgggttttcccatcactctgcgtggctggtggtgctgccaggtactggcttctgctgctgctcatgccgcacctgtcctcttagggtgctgtctcaggacatgccaaagctgccagggacttcagggggcccatcctgtgaaactcacccaggctttgtgcttggtgtggaaacatgaatctgccctgcctgtcttggtcctgcaagggcctcttctctagcagggccccccatagtcctgatctgaggctctggcatttcctgggtgcctgggtagcggtgtgggtgcttctggctctgctgggtttctctcctgggcgtgtcccctgctggctctcagatgtgttttgattatactacaaggcgagtgggggggccatcagcccctcttctccaagtatcccaggtcccttccctcccccactggggcctgtggttccggccgggccgggggaaagcttgaaaaggctggatgaggccccaaaatttgtatctttgcagctgaggaggagctgatggaaactgatgaggctggcagcgtgtacgcaggcgtcctcagctacggggtggtcttcttcctcttcatcctggtggtggcagctgtgatactctgccgcctgcgcagtcccccaaagaagggcttgggctcgcccaccgtgcacaaggtctctcgcttcccgcttaagcgacaggtaacagaaagtagataccaggttttgagctccctgtcctgcctcgtgtctcctagagtcccagcagggcctggggcctgcccgggacatagtttctgtggttgggtgggctgatgcctccttatctccatatggagctcaggttttctctgaggtgcaaaacatttttaggagtcttaagtcaccactgtatagaagtccgagcagctagcccttttcttggctccacaccttgcctcataggcttgaccttgccatcctggaggctctaccaccccaccccttttacaatgcccagcccacccacgttgtatggtaccaatttgtcctgatgacccaagcaggtgtccttggaatctaactcctctatgaactccaacacaccccttgtccggattgcccggctgtcctcaggagaaggtcctgttctggccaatgtttctgaacttgagctgcctgctgaccccaagtgggagctatccaggacccggtcagtggtggtgagggacagtatgtacttggtggggtttagtatatacctggtgggggttctgcggttgggggctaggtagctactaggcagggccttgttggaggtatccccgagatactccagggtgaggtttgaggggtcattctttgtcttcatgagcaaatgcccctagggtttctgagatacagtggtacatgacccatgagggctgggggtgctgggcacacactcactgcctctgtttccatggtcaggctgacacttggtaagcctcttggagaaggctgctttggacaggtggtcatggcagaagctattggcatcgacaaggaccgtactgccaagcctgtcaccgtggccgtgaagatgctgaaaggtgaggagggagggaagtagaggggcctttgagggctgtggggctgtcagctgacacctctgttcccggcacagatgatgcgactgacaaggacctgtcggacctggtatctgagatggagatgatgaaaatgattggcaagcacaagaacatcattaacctgctgggggcgtgcacacagggtggtaggtcaggtggttggtgggcccactggtggatggcgctctggagattgacagcatctctaaggtgcctgtgcttccagggcccctgtatgtgctggtggagtacgcagccaagggcaatctccgggagttccttcgggcgcggcggcctccaggcatggactactcctttgatgcctgcaggctgccagaggaacagctcacctgcaaggatctagtgtcctgtgcctaccaggtggcacggggcatggaatacttggcttctcagaaggtgggcagagacagggaccaggccaggtggagcctctctgagtggaagaccgggtgatcgtttgcctgagctagggaatggtcatctcaggttccttttgtctcttcagtgtattcacagagacttggctgccagaaacgtcctggtgaccgaggacaatgtgatgaagattgcggactttggcctggctcgagatgtgcacaacctggactactacaagaagaccacaaatgtgagccctggtcctgcatggtgggggtgaagggtccctccaggaggccccacccgagagccaacacctctccctctgcccagggccggctacctgtgaagtggatggcaccagaggccctttttgaccgagtctacacccaccagagtgatgtgtatgtgtccctacataggatgggggtagggagatctgaagagagaagagatacaaattgcacttttgcagtcttcagggtcctggtccgctcattgggccaccagcacagccctggcttctctttatcctagtgccctgctttgcccatcagtggtatgtcctggtacagggctgctgcagtaacaggccaggggtaacaggccttctatcctcaattccctgcagttggtcttttggtgtcctcctctgggagatctttacgctggggggctcaccgtatcctggcatcccagtggaagagcttttcaagctgttgaaagagggccaccgcatggacaagccagccagctgcacacatgacctgtgagccttgttcattcctctacagtccagtccctggggtggcaggattcctaccagggcccttggaatgtgtaggagactggtggcctggagggaggttggggtgggcaggaggccagggagccatagctatacttgccgcaggtacatgatcatgcgggaatgttggcatgcggtgccttcacagaggcccaccttcaagcagttggtagaggatttagaccgcatcctcactgtgacatcaaccgacgtaagtgtccctcagtcctgccccctctgtggctgccttgcttattttaagtgttgctctttggagctccagtggcggggctggcctttagggggcatagcctgaacacagatggcgtgggataaaagggggtgaatgcaaagggacagtcctgacaaccatgtccaccaaacaggagtacttggacctctccgtgccgtttgagcagtactcgccaggtggccaggacacgcctagctccagctcgtccggagatgactcggtgttcacccatgacctgctacccccaggtccacccagtaacgggggacctcggacgtgaagggccaacagtcccacagaccaagccccaggcaatgtttacgcggaccctagcccgccctgctactgctggtgtgcagtggaccctagccagcccagtgcaatgggccaacagtagacaagacttcctgcgtgtttatccttggctcctgggtgcagaggccccttgggaacatgcactgctgtagagtaatctcctgactggccagggccaggagcaccaaacaagaatgtaagaggcccaccctgtgcaaccctggggttctggccctctcatttcccactgctaccttccagggaccattgtggagagggctagactccatgtccagagtgggccttggccttcttggtgccccaagctgagcctacagggaggctctgctctgtgtggcaaacctctctcctacatggcaccttgtgcctgggggtgtcatagctcgacatctccaggctgcctgctttccaccctgcccctcagagacaaattacgggtacctgaagggggggcataatgtctatcagaaaggtttattccagaggaaaatgtacatttatataaatagatgttgtgtatgatataaatatatacatacatatatataagaatatctatatggaaaaaggcaaagttgaggcccaagggagcaagatactccatgggtctcactaggaaactggcaagagcaggctgagaagcaaggggcttttctggcacggcagttttgtttgtactggacctgtatatttgtaaagctatttatcaacccccagagcgccagtccccgaccccaggttcatagcgtttagtcccagggtattgcagccatcttaagttgtaacttattaacagcggaagaggttcatgctggatttagggaattgctgagaacgtgcgtctggcctccaccaggctggccgtggccccttggcgcttgaatggctctcctagtcagagctggctccagggagcattttctgttgcctttggccctcttttgtgggggattagatttatataggaactttctttaggagatgtttaaaaattttaaggtgaactggtatttttcatacagattattctaattgctatgtattccaggcaggagcctgtgcccagggaagggctggccctgcaagaaggttcagatgttaatagttatctgttacaagtttatctatctataatttattgagtttttacaagttgttttgctgtaggcttaacacttcctatgcagtgcttctagacttttatagcctagactgctacctttcaaagcttgggagacagtggtgaatgcaattttgttacttttgtactgtcactgggccctaggcttgggtggctgtcccttgcctgtcaaccagcagggtcaggacagtggctcagggtgactttcttggggcctagcacatggtttgtcagcccacactggcagatgtggttttgttaacacaaccaacttactttccaaaaaataaagagataactggttccatgagtgcctcgatttctgttctgagacgggtacagctgtgtccttgttgcctgtggggacaggtggggaggtgggataatagcacctggggaatgagcagcctctggctggtccctggaagaaggtactggtcccaggctccaagggaccttgcttttctttctcagggcaaggacagctggactgcggggtgcctttctgtggcctaaagtggcagattggtccgggttatcagagtctagaggtgccaaggacaggattcaagcaagttgtgtccataggaggggactgtggatatgtatgtggaggaagtgttttgggtctcttcggtcccctggctgtcctgacagggaagggatctcatgaggacagaaggtgcttaattatatttgaaagttctctggggaaaaggcaggtagccaaaccccctggtttaagcaatctgcattgggccaggcaatctctgagtttaaggcaaagctggtctacacaatgagtcccaggacaacatagaacttagggtttctttcctatatccattttgtctgtcatactttctaaccttgggagatgacctggggactgaataaatgtccattctaggttcccttcttaggatcaggcccaccttataggtgagggcatttttttttttttttttagtaagtcaagatggctggagtcttggttctagactgaaataggagcttgaggatcttcaggtgaggtgtactgggttttaggggaaactataggccttggcactgttggctactcacaggaacttcttgaagggcaccagatagtttcagggactcagagccacacagacacatgatgatagtgaccaggcagaaggcagctaaaggatctgactaaagcctacagaacagcgtgtgtgcatatacgagcacgtgtgtgcaagtatgtgtaggggcgtggcaccaggaggatatattcttttttttaggaggatgcatttttatccctgaaacaagctcaattacccaagagagctgtgtgccagcctgtagcgccctctagtgccatgctgagcatagctttgtatggtaatctggacgcccttttcaagtccagggctcttgttagatctagggaaagctagcaccaaggggttggtccacagggacaggagtggtcctgagagagtcaggggccaggtcaggctgctgcaccaccagggtttcctgggcggccactgcatagggaggatatagtatgtgtggctctatgtcatcaaacacctgctgctgtctagtcttctctggaggactctgctccactgccttgccttttcaacatggttggtaatgatggtggatggtttcttggcctgctttggctagtaccaggaacaggctggctcccaggacactcctgtttactgccactggcctgtggctggctattattctgggttggggtagatcctagtgttcagaggaccagcaacaagaattatcttctgagtaggagagatgactcagtgatctatttagagtacttgctgcttttggagaggacctggctttattcccagcacccacataatggtcacaactatccataactccagttttaggggctatcaccttctggactgtgggcactggacatacacatgttacacatgcatactttcaggccaaacagataaaaaagagaattatcttcccaagaagggaagaaaccagttgtgtgtcaagtgtcctgttttttcagtgaaactcgggcacacaaagctttcctcaagagtgacttagggacagggcttgagtttattgtgtaagtctacctcatccgaacattagctttgttctcaatacagcaagtgggcgtgctgtgctcttttttttttttttttttttaagatttatttatttattatatgtaagtacactgtagctgtcttcagacgcaccagaagagggcatcagatctcattacaagtggttgtgagccaccatgtggttgctgggatttgaacttcggaccttcggaagagcagtcgggtgctcttacccactgagccatctcaccagcccccgtgctgtgccctttaaatggctgtccttcctcaccaacaagcagttcctacccttgccctgagacttgtacttcttgagcctggggacgaatgtgacctcaatcaagcattctagaaggcaccaagaatggctccaggaggccacacactacattctggtgtcctgggctgggcagcagtcactgatgagctcagaaggggatactgtgactttatcctaacacccagacccccctcccagctaaggtcccaaagcaagtaccatggcgggacctggggaattgctcccaccaggcacactgtcctcctcaagtcccatggctggatcctgtctctggactgaatagtagatgttgtgtgggcatagaccacatttccctgggattcctcagccaaggtcctagctcctgtccaccccgcacagctcctaaggaaaggttcggccctgaggtgatgttctgtggttgtctgagcgctggcaggccaagagagcctggttaggtgtgggaacacccaacctggacacaccactgtacagcagacaagtcatcagtggcactttattcagtcagttcttacatcaaggtgtttagaaaacatcatgctgcctgctagccccgcagggccctgggttagcctagggtctaagaagtccttccttgtcagcttctataaaacagggctgtagcacaggatgggggtacatgggcttcctcagataggtcccacaggtcatgagcctggaaccaaggcttgagcccccaaatgcgagctggcactcacctaggggctgaggggagagtcaagacccactaaaatccgaaaacacacctggtgaccacagcacaatcattagagctcaaggtggtctgagtttccactcaatgtcttgaatagattgctcagggctcagaagtatcactttgcgctgttacatgaacatgggagatgtctacacatgatctagctggaggcactgggacccctggaagacagaagagggtatagaacttgctcccctaccatggtactaggaggcgcagcctaagaccatgagaatggcttttaagaactgtatggtacccttcacatttgagatgttaataggccaaaaggagcctggaatttaggtgccagctctccagatcctggtgggaaggtggttcagagtggagagaggaaacgccaggctcctgggttgaacccttaatttaacaggtgcagacatgtcagctcctgaacgtacaccctgggcaagtgctgaggtacaggacagaatgacagttgaaatacagccagctttcaaatgctcagtctgagtacaggtctcagtcctggatcctccatttcttttttttaagggggtggtggtggtggtagtggtttgagacagggtttctctgtgtagccctgcttgtccacctgcctttgccttccaagtgctgggattaaaggcgcacactgctatcactgcctggtggatctgctatttctaaccctgacccaggtcagttaagcaaacagatgtgaggacaactccaaaaaccaagggaagcatccactggcagacctagcacgtgtgtttgctaaggtcctgcagtgaggtgatggcgtgacctgcaaggacagagtccagagtggagggtagaggtacagtagggaattcctgaggcagcagcagacagtacaggccactgacagtacccagtaatacactaaaggatgaagacgatgggcagacacaggacagctccagactgctggtcataggagataccctctactgtggggacacacctggcaaccataatcttgtcctcgtagggacaccaggattcagatttaaccacggagccactaggctccttctgctgttactatgcacaggtttacatgcaagaatcaccttattcctgcttagcataatgtttcctttaacagttaagaaagaagtttcaagaaactgagaatgtcccattctgctcactgcttctctgtacatgttccagatcctgtctggagtcaaggattttttttcccctggacagggacttgctaagtagcctaagctgaacttaagatcttcctcccgttgcgctccaaggatggggttacaatgtgaaggtggtggtgaggccacaggacacccagccctggcctgtccatggagccatttccaaatgagaaaggcaaagagctctagactgtccacttagaggggtgccagtgaactgttggcgggcagggaacaccattctgaaagctttgtggcatcacagtacaacttcctcacttcttggtggctggagcacagccatgaacatttgtgctaaagaagctggagccttgagcctacaacatacagagattcccttgtgaagccccatcttgcacattgccctgtgggttaggacttgaattttctgttacaagccacacaaagcctcaggtatattcaagttgcagatgtcagttctatccccaaggcctgctcagcaatgtgaatgcccaacagaaaagatttcattttcaaaggcttcttcaatgtatgtcacccactatttaggaattactcatgaattaggcagacggtcatgtatgaaaagtcagtactagtcagttaaagaattattaagtggtgaccaatggtgaactcaagagagcgctagtcaacatgtctcggaatccatacaggatacagacactgctgtcagggacctgcagttatgacaactgtgaaggcgtgagcagacacatctatgtacatgggcaatcgggaatctcaatcccttggactgacggcagtgtcctcagagcagagtggcctgcatctgtgttatctaactcctagcccaaggcctatgaggacacatagcagacacatgctctgggctccacacaggtgctgaggtccagctggttctccctcgcctctcacaggctggaggctcgctcagatcctgatccaggaaggacacatacagagaaatgccttcctactgagcctggccagagccatgtctgaagctagggatcagtgtagggctatgatcctattggcagctgtaccttaacccaaggcttagggccgttcagtaccacaccagagcatgagtccacagagccaccctctccggctccagccagactgaatcttcgtggaatgatgaaaattaaaaattgcttcattatggaagtttctgatttattccagacaaaatattagatttgccactaagaatcacctcaaagcaatcactcttgtgtgtcatgcccctgtggctggcacggcatgatgaaggcagacctgtgggccagaagctggcagctctaattcttcacttctgcggcctctttctcagccttctccttggccttctctttctcttctatcttttcttctttctctagtgtggccacaatttcagctacctgggtggtagagatctgaacatcttctttgttcaccaagtcgattacctacacacagaggagggagacttaggaggggctccaccaccgcagtcacctgctgtccctcaacagctccgggagactccccctctgagccatcctctaggttggacacttgccattttactgcatgctatgggtatctggttctttctgctgctcagacctccaagagttatagacttcacagcgagggtgcggcaccagttcccatagcacatgcatgtttgatagtgcctgttttaaaatggaactaaaggaaattaacctatagttctggctatataaagaaaaatcacaagctggccaggtgtactgagaaccaagatgacagtggcaaacttttttccctcaagaccataacatataatttcagtaggttcatgacagtttgcaggctggagcccaggcttcccttagaggctggatctggactcaggtcttctcggctgacatccctggagcttagctactattcctactaactctacctactcagtatctttcaggcagccccaaagggatcctggcagaggtgttgaccctgttcctcagatccaatagggatgcaaggtcccacagtacatgtggaaagattccaaggcggcatgcaggggcattttcttatctcaccggtatgtctggaactttagtaacttaattccagcgtgatttcaaatgagagcaaagggctaagacacttgggcttgcaaacttgacttcccaacagtcttccttttgaaaggatttgttgatttttactatgtacattgttgttttgccccttggcgtgtctgtgaaggtgtcagatcctctgcacctatagttacagactgttgtgagctgctctgtgggggtaggaattgaaccttattcctttggaagagcagctagtacctgtaaccaatgactaagccatttccccaggcccttcctgatcgccgtacagctctgaataagcagcccccccacaaacccctgggccctagaacaggaaagcagccgggctggcctggcgcagccgcactgactcaccttgacaaggtcatcgatgttgatattgccgtccttattatcatccagggctgaggtcaaactgatgagcttgtgctctggaatgtgcttgatttgcttcatggcgctgatgagctcagtgatgctgatgacactctccctggggagtgcaatctgcatgtgacattggccaggtacctgctctcatgccttacccacagctctttccataaggtctgacactggagccatgcatgaactggaaatatcagcatgacttctcccacagtgagatcctaagccgctttcccttcaagatgcaaggctagcatgggcgcttacagaaagcatccttggatgctggggaggttgcttagtggctgtcagtgttctactatgtgaggacctgagttcaaatcctcagaacccatgtaaaaacctggtagtgatcacacatgtgtctattaccacagtgctattgggtgggggcaggcataggaagatcatgggcttgaaggctgacggcctccatgtacacataagcatgtataccagcacacacacacacttataacatagcacatatgcaaataccacactcacacacatgctcatgcataccacacacacacacacacacacacacacacacacacacacctgaaaaaagttttgaggctggagaaatggctcaatcgtaaaaagcaattattgtacctgcagaggcttgagttcagttcccagaacccatgttgggtggctcacagttgtctataattccagctctaggggatctgacactttcttttggcctccatgggcaccacacacatgtgcatctccccacagtggggagcaccacgtcttccagtctgtcagcaaccaattccaggacttagagtagaagccacgctgtagccatctgcctcactgtggagtctatggtcaggacactgtttgctggtgtctgctcaggaaggcagactgtccacaatggtgttataccagggttagaaaagtggggaagcagctgggcagtggtggccagcacttgggaggcagaggcaagcagatttctgaattcgaggccagcctggtctacagagtgagttccaggacagccagggccacacagagaaaagtgatgaatcaggagaaggcctgacagtttgaagaaccaggaaccaagttcaaaaagctcaaaaggatgggaattcagggaagaggcaggtctgatctacctaggtaaaacaagcatggagatacagaaactgagctgtgaagggaggaaaaatgagagcagagatctcttgtaatcctggctgcccctggccctaagtgaggtgggcaggtagaggtcaaggagatacactttgggactagaggcccactcaccctgttggagtgctctggctggggcccagcttgccatcctgttgagtggtctccagctgtgtgatcaggccatcgatctgcccgatcatctgctgcactcgctttgacagcctcttgctcgctgcagattcttctatgtacttctcctcacccgtctttgaaagttccttcttgatctcctgtaagtcctaatttaaaaagtttaccccccaaaagagggagggctctacattaatttgaacttaaacattaagtcgttaatttgaactgggacggggctcagtggtacaaggtactatgcaccaggtcctgtgcttgacccccagctccacaaaacagaaagcaaccaaacagaagaattaaattcagcctcaggaactgcagagtcttatttctctcatgcaaacttattcttttttgttgttgtttgtttgtttgtttttcgagacagggtttctctgtgtagccctggctgtcctggaactcactttgtagatcaggctggcctccaactcagaaatccgcctgcctctgcctcccgagtgctgggattaaaggagtgtgccaccactgcccggcacaaacttattcttattaatttatttttgtaagttcaaacttttaaaatctattctgaatttcaacttcctttgtagttagcaatgaataaatacaaaggctcaaggatgcctaagcactgccttctttatatgggtcagaggtcacagggctaaaagcagggtgaggagcagagggaataaggcactgccttgtctggtgaaaaatgtggtttctggtggacaagtcacataaccagaggagactaccacagggaagaggagagatagaaattgatttttaccaacaatctctaaatcattacttttcaagtagagtggggataatggtattgttacctcagagtagaaaacagtgaatgttggggctgaggatgtagttagtggaatagcacttatctagcattatgaaagaaagaaaaggagggaggcaaagaaggaagggagggacaaccactagattaaaaaagaagtaacatggagagctctgaatgaaagcatgatttcaagcattaagtgactaagtgactaagtgttcccatgacccctggtttctgaccgctatctctatctacttacaccctgttccgtgtaggccagggcagctgattaggctggttacctacaatggtgcatatccacccacctcactgtagtcctggacgtcctctttgagcagctccagctcctccttctccttggtcagggacttcttctgctcctgcagcttggagcaggcgtcactgaggatgtcaatctcctccttggtaatctcttcaccctggagagaaacgaggacgtggataaacctaagtccagggaacaatagcttccgctcttctctaaatgctgaaagcctttctgttcataccacacaggcaagcgcttgaggacagccctgagctatgctggctattcccaaatgcttctttatattccccaggattccattcccaggcgagattggcctgccttttgctctctcggacagcctttgttttctagaacgttacaggagacggattaccagctctgctactttttatcaaatcacctattttgatgtctaatctggacagcaacaccataatggccttccccttcttagtggcttctagtaactagaatgacagctgctatgaatgtctgtgaataggtgtagagcagctgatgctagggtagaagtttgctactttagagaaccattaaagtggtttccaaagtgacccaggccctccacatcctcaccaaccctggatgaagggcctttaatgctcaggaggcacagaaaagcagattatctgagtctgaagccagcctgatctacagagcaagttccaggacaaccagagctccacaaagacaccctgttttttttgtttgtttgtttgtttgtttgtttgtttgtttgttttttcccctgagatagggtttctctgtata

SEQ ID NO: 183 - DNA, 3836 bp, Mus musculus
gctctggagccatggtagtcccggcctgcgtgctagtgttctgcgtggcggtcgtggctggagctacttccgagcctcctggtccagagcagcgagttgtgcggagagcggcagaggttccagggcctgaacctagccagcaggagcaggtggccttcggcagtggggacaccgtggagctgagctgccatcctcctggaggtgcccccacagggcccacggtctgggctaaggatggtacaggtctggtggcctcccaccgcatcctggtggggcctcagaggctgcaagtgctaaatgcctcccacgaagatgcaggggtctacagctgccagcaccggctcactcggcgtgtgctgtgccacttcagtgtgcgtgtaacaggggctccttattggactcgcccggagcgaatggataagaaactgctggctgtgccagccgcaaacactgtccgcttccgctgcccagctgctggcaaccctaccccctccatctcctggctgaagaatggcaaagaattccgaggggagcatcgcattgggggcatcaagctccggcaccagcagtggagcttggtcatggaaagtgtggtaccctccgatcgtggcaactatacctgtgtagttgagaacaagtttggcagcatccggcagacatacacactggatgtgctggagcgctccccacaccggcccatcctgcaggctgggctgccggccaaccagacagccattctaggcagtgacgtggagttccactgcaaggtgtacagcgatgcacagccacacatccagtggctgaagcacgtggaagtgaacggcagcaaggtgggccctgacggcacgccctacgtcactgtactcaagactgcaggcgctaacaccaccgacaaggagctagaggttctgtccttgcacaatgtcacctttgaggacgcgggggagtacacctgcctggcgggcaattctattgggttttcccatcactctgcgtggctggtggtgctgccagctgaggaggagctgatggaaactgatgaggctggcagcgtgtacgcaggcgtcctcagctacggggtggtcttcttcctcttcatcctggtggtggcagctgtgatactctgccgcctgcgcagtcccccaaagaagggcttgggctcgcccaccgtgcacaaggtctctcgcttcccgcttaagcgacaggtgtccttggaatctaactcctctatgaactccaacacaccccttgtccggattgcccggctgtcctcaggagaaggtcctgttctggccaatgtttctgaacttgagctgcctgctgaccccaagtgggagctatccaggacccggctgacacttggtaagcctcttggagaaggctgctttggacaggtggtcatggcagaagctattggcatcgacaaggaccgtactgccaagcctgtcaccgtggccgtgaagatgctgaaagatgatgcgactgacaaggacctgtcggacctggtatctgagatggagatgatgaaaatgattggcaagcacaagaacatcattaacctgctgggggcgtgcacacagggtgggcccctgtatgtgctggtggagtacgcagccaagggcaatctccgggagttccttcgggcgcggcggcctccaggcatggactactcctttgatgcctgcaggctgccagaggaacagctcacctgcaaggatctagtgtcctgtgcctaccaggtggcacggggcatggaatacttggcttctcagaagtgtattcacagagacttggctgccagaaacgtcctggtgaccgaggacaatgtgatgaagattgcggactttggcctggctcgagatgtgcacaacctggactactacaagaagaccacaaatggccggctacctgtgaagtggatggcaccagaggccctttttgaccgagtctacacccaccagagtgatgtttggtcttttggtgtcctcctctgggagatctttacgctggggggctcaccgtatcctggcatcccagtggaagagcttttcaagctgttgaaagagggccaccgcatggacaagccagccagctgcacacatgacctgtacatgatcatgcgggaatgttggcatgcggtgccttcacagaggcccaccttcaagcagttggtagaggatttagaccgcatcctcactgtgacatcaaccgacgagtacttggacctctccgtgccgtttgagcagtactcgccaggtggccaggacacgcctagctccagctcgtccggagatgactcggtgttcacccatgacctgctacccccaggtccacccagtaacgggggacctcggacgtgaagggccaacagtcccacagaccaagccccaggcaatgtttacgcggaccctagcccgccctgctactgctggtgtgcagtggaccctagccagcccagtgcaatgggccaacagtagacaagacttcctgcgtgtttatccttggctcctgggtgcagaggccccttgggaacatgcactgctgtagagtaatctcctgactggccagggccaggagcaccaaacaagaatgtaagaggcccaccctgtgcaaccctggggttctggccctctcatttcccactgctaccttccagggaccattgtggagagggctagactccatgtccagagtgggccttggccttcttggtgccccaagctgagcctacagggaggctctgctctgtgtggcaaacctctctcctacatggcaccttgtgcctgggggtgtcatagctcgacatctccaggctgcctgctttccaccctgcccctcagagacaaattacgggtacctgaagggggggcataatgtctatcagaaaggtttattccagaggaaaatgtacatttatataaatagatgttgtgtatgatataaatatatacatacatatatataagaatatctatatggaaaaaggcaaagttgaggcccaagggagcaagatactccatgggtctcactaggaaactggcaagagcaggctgagaagcaaggggcttttctggcacggcagttttgtttgtactggacctgtatatttgtaaagctatttatcaacccccagagcgccagtccccgaccccaggttcatagcgtttagtcccagggtattgcagccatcttaagttgtaacttattaacagcggaagaggttcatgctggatttagggaattgctgagaacgtgcgtctggcctccaccaggctggccgtggccccttggcgcttgaatggctctcctagtcagagctggctccagggagcattttctgttgcctttggccctcttttgtgggggattagatttatataggaactttctttaggagatgtttaaaaattttaaggtgaactggtatttttcatacagattattctaattgctatgtattccaggcaggagcctgtgcccagggaagggctggccctgcaagaaggttcagatgttaatagttatctgttacaagtttatctatctataatttattgagtttttacaagttgttttgctgtaggcttaacacttcctatgcagtgcttctagacttttatagcctagactgctacctttcaaagcttgggagacagtggtgaatgcaattttgttacttttgtactgtcactgggccctaggcttgggtggctgtcccttgcctgtcaaccagcagggtcaggacagtggctcagggtgactttcttggggcctagcacatggtttgtcagcccacactggcagatgtggttttgttaacacaaccaacttacttt

SEQ ID NO: 184 - protein, 776 aa, Mus musculus
MVVPACVLVFCVAVVAGATSEPPGPEQRVVRRAAEVPGPEPSQQEQVAFGSGDTVELSCHPPGGAPTGPTVWAKDGTGLVASHRILVGPQRLQVLNASHEDAGVYSCQHRLTRRVLCHFSVRVTGAPYWWERMDKKLLAVPAANTVRFRCPAAGNPTPSISWLKNGKEFRGEHRIGGIKLRHQQWSLVMESVVPSDRGNYTCVVENKFGSIRQTYTLDVLERSPHRPILQAGLPANQTAILGSDVEFHCKVYSDAQPHIQWLKHVEVNGSKVGPDGTPYVTVLKTAGANTTDKELEVLSLHNVTFEDAGEYTCLAGNSIGFSHHSAWLVVLPAEEELMDEAGSVYAGVLSYGVVFFLFILVVAAVILCRLRSPPKKGLGSPTVHKVSRFPLKRQVSLESNSSMNSNTPLVRIARLSSGEGPVLANVSELELPADPKWELSRTRLTLGKPLGEGCFGQVVMAEAIGIDKDRTAKPVTVAVKMLKDDATDKDLSDLVSEMEMMKMIGKHKNIINLLGACTQGGPLYVLVEYAAKGNLREFLRARRPPGMDYSFDACRLPEEQLTCKDLVSCAYQVRMEYLASQKCIHRDLAARNVLVTEDNVMKIADFGLARDVHNLDYYKKTTNGRLPVKWMAPEALFDRVYTHQSDVWSFGVLLWEIFTLGGSPYPGIPVEELFKLLKEGHRMDKPASCTHDLYMIMRECWHAVPSQRPTFKQLVEDLDRILTVTSTDEYLDLSVPFEQYSPGGQDTPSSSSSGDDSVFTHDLLPPGPPSNGGPRT

SEQ ID NO: 185 - DNA, 4206 bp, Mus musculus
gtggcgggagcaccccccaacccccgcccgggctgctgcgcgccgggcagccccagttcagtgcactgtggcagcgggggtggcgggagcagctggcgccgtgcgatccactccggcggggggactcagtggtgggcggccggccactgggacagaggagaccctggaaaagcgggccgagagacggagccgcgcgtggtgagttgggctctagcggccgccagtctccacagaggcgttctcccaccggcgccggagccgggcgtggggggttgcagcatgcccgcgcgcgctgcttgaggacgccgcggcccccgctctggagccatggtagtcccggcctgcgtgctagtgttctgcgtggcggtcgtggctggagctacttccgagcctcctggtccagagcagcgagttgtgcggagagcggcagaggttccagggcctgaacctagccagcaggagcaggtggccttcggcagtggggacaccgtggagctgagctgccatcctcctggaggtgcccccacagggcccacggtctgggctaaggatggtacaggtctggtggcctcccaccgcatcctggtggggcctcagaggctgcaagtgctaaatgcctcccacgaagatgcaggggtctacagctgccagcaccggctcactcggcgtgtgctgtgccacttcagtgtgcgtgtaacagatgctccatcctcaggagatgacgaagatggggaggacgtggctgaagacacaggggctccttattggactcgcccggagcgaatggataagaaactgctggctgtgccagccgcaaacactgtccgcttccgctgcccagctgctggcaaccctaccccctccatctcctggctgaagaatggcaaagaattccgaggggagcatcgcattgggggcatcaagctccggcaccagcagtggagcttggtcatggaaagtgtggtaccctccgatcgtggcaactatacctgtgtagttgagaacaagtttggcagcatccggcagacatacacactggatgtgctggagcgctccccacaccggcccatcctgcaggctgggctgccggccaaccagacagccattctaggcagtgacgtggagttccactgcaaggtgtacagcgatgcacagccacacatccagtggctgaagcacgtggaagtgaacggcagcaaggtgggccctgacggcacgccctacgtcactgtactcaagactgcaggcgctaacaccaccgacaaggagctagaggttctgtccttgcacaatgtcacctttgaggacgcgggggagtacacctgcctggcgggcaattctattgggttttcccatcactctgcgtggctggtggtgctgccagctgaggaggagctgatggaaactgatgaggctggcagcgtgtacgcaggcgtcctcagctacggggtggtcttcttcctcttcatcctggtggtggcagctgtgatactctgccgcctgcgcagtcccccaaagaagggcttgggctcgcccaccgtgcacaaggtctctcgcttcccgcttaagcgacaggtgtccttggaatctaactcctctatgaactccaacacaccccttgtccggattgcccggctgtcctcaggagaaggtcctgttctggccaatgtttctgaacttgagctgcctgctgaccccaagtgggagctatccaggacccggctgacacttggtaagcctcttggagaaggctgctttggacaggtggtcatggcagaagctattggcatcgacaaggaccgtactgccaagcctgtcaccgtggccgtgaagatgctgaaagatgatgcgactgacaaggacctgtcggacctggtatctgagatggagatgatgaaaatgattggcaagcacaagaacatcattaacctgctgggggcgtgcacacagggtgggcccctgtatgtgctggtggagtacgcagccaagggcaatctccgggagttccttcgggcgcggcggcctccaggcatggactactcctttgatgcctgcaggctgccagaggaacagctcacctgcaaggatctagtgtcctgtgcctaccaggtggcacggggcatggaatacttggcttctcagaagtgtattcacagagacttggctgccagaaacgtcctggtgaccgaggacaatgtgatgaagattgcggactttggcctggctcgagatgtgcacaacctggactactacaagaagaccacaaatggccggctacctgtgaagtggatggcaccagaggccctttttgaccgagtctacacccaccagagtgatgtttggtcttttggtgtcctcctctgggagatctttacgctggggggctcaccgtatcctggcatcccagtggaagagcttttcaagctgttgaaagagggccaccgcatggacaagccagccagctgcacacatgacctgtacatgatcatgcgggaatgttggcatgcggtgccttcacagaggcccaccttcaagcagttggtagaggatttagaccgcatcctcactgtgacatcaaccgacgagtacttggacctctccgtgccgtttgagcagtactcgccaggtggccaggacacgcctagctccagctcgtccggagatgactcggtgttcacccatgacctgctacccccaggtccacccagtaacgggggacctcggacgtgaagggccaacagtcccacagaccaagccccaggcaatgtttacgcggaccctagcccgccctgctactgctggtgtgcagtggaccctagccagcccagtgcaatgggccaacagtagacaagacttcctgcgtgtttatccttggctcctgggtgcagaggccccttgggaacatgcactgctgtagagtaatctcctgactggccagggccaggagcaccaaacaagaatgtaagaggcccaccctgtgcaaccctggggttctggccctctcatttcccactgctaccttccagggaccattgtggagagggctagactccatgtccagagtgggccttggccttcttggtgccccaagctgagcctacagggaggctctgctctgtgtggcaaacctctctcctacatggcaccttgtgcctgggggtgtcatagctcgacatctccaggctgcctgctttccaccctgcccctcagagacaaattacgggtacctgaagggggggcataatgtctatcagaaaggtttattccagaggaaaatgtacatttatataaatagatgttgtgtatgatataaatatatacatacatatatataagaatatctatatggaaaaaggcaaagttgaggcccaagggagcaagatactccatgggtctcactaggaaactggcaagagcaggctgagaagcaaggggcttttctggcacggcagttttgtttgtactggacctgtatatttgtaaagctatttatcaacccccagagcgccagtccccgaccccaggttcatagcgtttagtcccagggtattgcagccatcttaagttgtaacttattaacagcggaagaggttcatgctggatttagggaattgctgagaacgtgcgtctggcctccaccaggctggccgtggccccttggcgcttgaatggctctcctagtcagagctggctccagggagcattttctgttgcctttggccctcttttgtgggggattagatttatataggaactttctttaggagatgtttaaaaattttaaggtgaactggtatttttcatacagattattctaattgctatgtattccaggcaggagcctgtgcccagggaagggctggccctgcaagaaggttcagatgttaatagttatctgttacaagtttatctatctataatttattgagtttttacaagttgttttgctgtaggcttaacacttcctatgcagtgcttctagacttttatagcctagactgctacctttcaaagcttgggagacagtggtgaatgcaattttgttacttttgtactgtcactgggccctaggcttgggtggctgtcccttgcctgtcaaccagcagggtcaggacagtggctcagggtgactttcttggggcctagcacatggtttgtcagcccacactggcagatgtggttttgttaacacaaccaacttacttt

SEQ ID NO: 186 - protein, 794 aa, Mus musculus
MVVPACVLVFCVAVVAGATSEPPGPEQRVVRRAAEVPGPEPSQQEQVAFGSGDTVELSCHPPGGAPTGPTVWAKDGTGLVASHRILVGPQRLQVLNASHEDAGVYSCQHRLTRRVLCHFSVRVTDAPSSGDDEDGEDVAEDTGAPYWWERMDKKLLAVPAANTVRFRCPAAGNPTPSISWLKNGKEFRGEHRIGGIKLRHQQWSLVMESVVPSDRGNYTCVVENKFGSIRQTYTLDVLERSPHRPILQAGLPANQTAILGSDVEFHCKVYSDAQPHIQWLKHVEVNGSKVGPDGTPYVTVLKTAGANTTDKELEVLSLHNVTFEDAGEYTCLAGNSIGFSHHSAWLVVLPAEEELMDEAGSVYAGVLSYGVVFFLFILVVAAVILCRLRSPPKKGLGSPTVHKVSRFPLKRQVSLESNSSMNSNTPLVRIARLSSGEGPVLANVSELELPADPKWELSRTRLTLGKPLGEGCFGQVVMAEAIGIDKDRTAKPVTVAVKMLKDDATDKDLSDLVSEMEMMKMIGKHKNIINLLGACTQGGPLYVLVEYAAKGNLREFLRARRPPGMDYSFDACRLPEEQLTCKDLVSCAYQVRMEYLASQKCIHRDLAARNVLVTEDNVMKIADFGLARDVHNLDYYKKTTNGRLPVKWMAPEALFDRVYTHQSDVWSFGVLLWEIFTLGGSPYPGIPVEELFKLLKEGHRMDKPASCTHDLYMIMRECWHAVPSQRPTFKQLVEDLDRILTVTSTDEYLDLSVPFEQYSPGGQDTPSSSSSGDDSVFTHDLLPPGPPSNGGPRT

SEQ ID NO: 187 - DNA, 35558 bp, Homo sapiens
  misc_feature (1)...(35558): n = A,T,C or G
gaagaaactctgtggagggaggtgcctgcccttggacccttggcttggtctgagcttcctggcagccagggcaaagagagaaagaaggtgccccatgctcaggagagagtggtgcagcagggttcggtgggcagacggctcagcctctacccttggcacccaggatgggggtcacctgcagcccgtccctctcttcagtccctgccctccaggaaccaggttagaggctgggcaggggtatggggcccagggcttcagtcctgaggtgcccgtgacagtgtcctgcagttcctgcaccgccaggaggatgagcctcgagggctaatgagccccacacggccgggccagcctcaaggccaaggcacagctcttgcggaaccctggcagcttctctgaggcagccatgcggaagatgggggtgtgtcctggtgcagcaagctgggggttgcttgggaggcaggacgagcttgacccaagggagggtgcttgatgggcagtcctgaggtgctcagccaggaagcgactatgattgatttgctgtgcacccagggcaggggctgtcctcccgaagctgagcttcttcacctgtcttctgactcacttatctccccgagccccggagatacaaggatcacaggcaggggccttctcctgagctggccagagctgggcaggacacttggggcacgcagcttttgtgggctagcctggaaactcggctatcctggacaccacactggcaacaggttgtctggagccaggtcggggcatgtggggcctgagccaaggctgtcagctgaagcctctgacattacttgtgtccctaggacaatcacacgtgagagcacatgcacacgtgaccatgtgagcacacaggcacgggttcgggccccaggctgtgctgccacctgaagcccctgccctggctgtggatgcccatttggctgggcacagcaaggcggcggccttggcacagggagcctgcccagccttgctctgacccagttttccatgcccaggcaggcgggtggcactggtgtagtggctcccagagcttctctttggcaacaccaatcccctgggcccaaagcagctccacaggggcacctggatggctccatgtgccctgggcatgtcctctgagagggtgggtgcccccctgggatgtggccacccagccccagcggtttcacaccctagaaccagtgccttctgcctgtggtccctaggcacacagctgccgctgcctgaatgcgctctgcctgccctgccttctgcctccagatgaacggacctgtcatccagggagcgatccctgtggccctccactctagacctgcaggctgcttccttgcccactcctgggggtcagtcatggcctggctgtagaccagatccttgaggggtgaatctggggataagcctcagagccacagggcctgggcaggcctcagaaggcatcccagagaagggagggtggaaggtccccatgggcagggaggcgcagggagcaaaggctgctgggagcagggaggggagctgggcgggcggaagggcggccgtgggaagccagccctggcctggctggcctgataagctgcccctttgatccacactgaggcaacacagacccccatcctgagataaccccgggcctgggacccaaggctctggtcaacccgccctcccgagtgtgcgctgccctgcccctccggccctgacagtgaccggtccttgctcagctgcaagctgggtgggtgcagtctgagcccaggcctggcgggcactccatgtgcccccaccccaggacctgctggtcctcaccctgccttcaaagcctccccagccccagcctctgtgtccagctctctgtcccctttggttgggaaggggcacctcccccgccccccagttcccatccccttcactgtgcccctgggaggcccctgaggccctcactccccagctggggctcagcaggtttgaggccctttgggcagccctgtctgaccagggctatagtgtggcacaggtgtgggcacaggtgtggcataggcgtgggcaccagctatgtgtggcttgggtgcacactgcgtaggcaccttctcccgggcgcctgcctctgcctggcgccggtcagcacccccatgccctcggtccctcccctgcccaggtcagtggacaatgaagctgtcagcagactggggccgggggaggcaggcaggcgtggcggggaagggaggcctcaggaggcgaagatgtctctattaggggctgcagaccttgcttccactgtcctgcccagccctggggactccgagagctggaggcagaggtggccccaagcttggggcagaaagggtcgtcttgtccatcagggccccagtcagccttgggactgggtccctggaaaggcaggcccatagatggaggagcccagagcgtggggctggccacaggtggtcagggagggtggaagcgtggctgggagctgcacagggatgaggtgtcgacggcgctgacatcccagccctgccagcctcctaaggcacccacggcccacatctccctgctgagcggaagcactgggggacgctctacccagtgcctcagcagaccctcagccaacggctgttagaatatacctcgtgtgaggtgcgtcacgatacccagctgtaaaatggggcaaccctgtggcttcaacagactccccttcccagtgcctgcggctgagctggagtggcaggagggcttctgtgggagcaggtggcaggaagcataagggctgggggacctgcagaagctccgtacccccgggaggctggggccagagcaggcttcttgcaggggcgctggtttcggccctcaccctgactgccctgccggatccgggcagacgaggccccacgcacaccgcagcaaggggcccaagacgccagccaggccctcaccttggcaagaggtggcttctgtttctgacaggtcaacagctgggctaggggaggtctccagggaccagccacgccccacttcctgagggctggagagggctggggagggtggcccaggtctgcgatcatcagggcctggccagggccttctttcccagattcccccagagctggagtccccagagccacgccccttccctggcatgccctggcgcccgggccatctcctcctgggcacttgcggaggttgcccctgctctccccactgccctctcagcaggcgtgaatagagtccctcatagcttgggagactgaggcccccagcaggtgcctcttacccaagaccttggaactgggcgaggtcctccgggcccaccaggacccgcctcagacatcaggctttgcacttgcagcccggagcctcccgaccccactcccaggccaagggcctctggccgcagcctccgccatcatctgccggcttctggggccgagcatcagggccctgtgcccctgctgagcgtgccgggtgggggccgggctgaaggctgcacctggaggcagggctcccgaggaagccgcccagggggtcagagccaaacagctgcctcctctagtcagccccatgcagccttacgggggcagcgccctgcagtggctgcgggtggggccgggtggggcagggctgccctccctcatgccgctgggcacctggcctggggcagggggctctggcccactctcgggtctccctaaatactgtggcgaacaccccacccttcccaagctcagctgaaacctccctggggcagggctgtcagatcaggccactgagcgcctcctgctgcctgtggctctgtgcctcagtttccccacctgtcaagtgggtgttggtgatgtggctggcatgaagtttctgtcaggagccaccagcactccgcaccttgccatccacaggttctcagccacacagggtgtggggttgccccaagccaacccatttgtgggggtggggccgccccacaccccggctgggctggacgggatctccagcctctcgtgggcagctgcctgctgggcccagttggccactctggactcttgggccctggccggaagcacgactgaggttgtccatggtttggggacgggcaggcagagggtggccaggcgaggccctgagaaggggctctggccgaggctggccaggtgacacccggagtggcgggcagggctgagaggaaggggcatcctgaagagggcggaggccgcggagggaggagggtgtgacgtggggttggaccggcggccccgaggcctggattcctaattcagccggagcctgtggagtcggggcttgtttattcttggcaggaaggctggtgctgggggggcagaagtggggagtgaagccttttcaaaaaataataataataaaaacgctcatttagaaggctcccaaggcgtgctgaactccaaaagggtcttggaaaaaatgctgagagggtttaagtgtaaatggacccaaaacaccataattaaatttcctttaaatttaccagagtttggggtcaaagaaaaaataaaacttagggaaaatacacttgaggtttcaggcaaatgccaagtgcttaggaaaatagattctgagctgctcagcggctaccggcctggcccccgccatcctgggagctgcccagccttaacccctccctggccagccctccactgcccgccccacccacccctgtgggggaccccaccaccacctcctgctgcttccgcacggttcgagccgccctcctgtgccagactccaggcagggagctgggcctcccccactcccaggctggggcaggagcccagggggagcctgaacattcacccccgcccccatctctacagctctctcttgtgtctgcagacagctctggtttcctttctttgctcatctgggagcagccacattttccaaaccaaagtcagaacttgaggtctagtggtctgagtgaaccaaacggtaaaaaggccagaatgtttgaactgggactgtcctgccatatccaagacgacaggctcccagcagctcatgactcacggtgttaccctttttcctcagcctgccaggaagctcagagctaaaattaagggtcttgctagctgcgttggcttagggattttggaatattttttcttcttcttcacgttctttaaaatttcatttctgttataatgagcaaatcaaggtttgtttttttattttaatacttttcaaattttgtgagaataaatttaaaaggcaaagtcaggcatggtggcacatgcctgtatttgggaggctgagacgggaagattgtttgagcccaggagttcaagaccagcctggacagcatagtaagaccctgtctcaaaaataaaatagaaggcagaaactacccataaactataatagctatagccccactaacagcccagtccagttcagcagggctacccaggggcccttcttcctccatcccatggtggcctgccctgatccctggcacccaaccctgtgccctgacagtgtggaagggcactagtggttcctggggaaggtggtaggagatggggagctccgaggggagatcgcatggctcccagggggtcccatgggcagaagggacttgatacccactccggacctccgtgtcccctgtccttccactcagcctcatggcagggccgagggaagctccccgcagcagccccagccctaggccaggttctgatcccagaggggagctgggcaggaggctctctctggcagctcgcctgccctgggttccaggtctccaagcctcggcctccctgcccacctccctgtcgggaaaggcggcagctgcctgcccggagtgctgtggggaacaggcggtgtggatctgagactgtgctgggaatgtcctctctgccgaaggcgcctctgccattttccgagtacctgcaagggagacgcaggagacgcgggtgtgagcggggccatgggcaacctgcggaggccctgcacccaggatgggcctccctcccaggcaccctctgccactcacccacacaggccccagcaagccaggctgcccagctctgagtcaccgccagggctgggctgggccgggccgtcagccgcacgcgccgcttgtctcggcccctgcctcccatactcaccttcaggggggacccctgggtatgggcctcaggaggtgggtgggggtgcagggggagtgggtagggaggtgtaaaccggagtccagcagatgggaagttcctgtccggccggcacctgcttggagcctcctgcacatgcggaccctcaacaggctccccgagtcctcgcctgccctccctgcctcaaaggccccagaagggcctacttcatcaggtgccacgaggatgaagccaggtaatattgcaaagggtctgtggaaacgcttgagcaagggcactgtgatgaaattgtggctactgacagctaatgtgcagagtcaccgaaattcaggagtcaagcagccggcctggcctcacctcagtgtcgggggaatgccatctgcacctgtgggcttggaagtgatccatttgaacaatacaattattcagacaatactaaaccgagctttcaggcaagacctcccgtggccctgacagtcctggggcagagtgggcagcaactccttgctggtggccgtggcggcactaggacccttttgaaaccaatttggcaaaattagcggcaccacggaaatgctcctgccctttgacctaactgctcccagacagtgccactggagaagccattcagaatgtggagggcgccagaggaggcagctgccacgcagtgcgtagtgggcagaacggcggcctccaaaagacatagtcatgtcctcaccccttgcagcctgtgaacgtgaccgtatttggaaaaggatctttgcaaatgtaattaaggtgagaatcttgagatgggggatcctcttggattatccaagtgggccctatatccaacgacaagtgtctgtataagagatggaagagaagatggcagagtgggaagcagaggctggagcaatgaggctgcgagccaagggacttggagccctgggacacttggagcccccaggagctggaaaaggcaggaaagatcttccctggagccttcagaggcagtgcagccctgcctacaccttgattccagacatctgctcttccagactatgagaaagtaaatttaagtcaattagtgtgcagtaatttgtgagggcaacctagaaatacaagatgctactgaactaaggaatccccggctgctactggagggagaggtggtgggcctgggccagggctgcggggacaaagggagggagtgggttgtgaaagtgcctggtccccagtccctcctcctgccagcactgcccactggtcaaacccacccagaagctggagagcaagggaccctcagagatagggtctgtaggatcaggctttcaaggacaaatgggagaggggctggggaagggacacatggggaccagacccctactgggcatttctgccaaggagaggatcctggtgaggaagaaagcagaaagctatgtgttcacagatgcacggatgctcccctcccagagacccgtggccgtgggtgcagagggagtcagtccttcttggaggtactgggaaaggagcctacagctccactgagcccttctgcctacaggaggggccccactcagcagctgttccctgagggagacctgtccacgcgtgagctccttcccacagtcccatccagtcccccaggggaaggggcaagacggtcaggtcaggacccacacgcatgctggtgctttcagaacctgatgacttagttggttaagagagctcacacctgcaatcccagcactttgggaggctgaggcaggtggatcagttgaggtcaggagttcaagaccagcctggccaacatggtgaagccccgtctctactaacaatacaaaaattagccgagtgtggtggtgcacacctgtaatcctagctacttgggaggctgagacaggagaatcacttcaatcagggaggcagagattgcttgagctgagactgtgccactgcactccagcctgggtgacagagcgagactccctctcaaaaaaaaaaaaaaaaaaaaaaaaagagcagggccaatgtgctgctgtgccttggggaacggtgtcctgggagcggacctggctggcagtgacctggggctgtgcactggagggggctggacagtgcacttggaggtgggtgagcctgggccccaagacggtctggggacatgggcttggccagagcaggaaatgagggtggccaaggacaggtgctgagccaccgagtcggcacagaggggtgggcatgagggcttcctgggagcagggcccttccaagtccctgaggtcagcccagggacaccctggcctctgggagattcatggtggagctgtgcatgggctgggtggggtcagcaggcagccagtcactgaggggctttcagcgcccattttcctgatgagcacctccagtcctggaagccacaagccaggcacgcagcccacccggccggccctcccggccagctcactggctcccatgggccccggacctccttgggctttgcctgaaggtgggagcagatggccttttccttgtgagggtggacacagaagccaacagtcatgtggggtgaggggacccaggcacctccagcgtcccccgcagggcagcaccttcccctcctgggaacccacccctcttcagctggactctgagcccaccccgtggagcccagaacctcgggccagctcaggctctgccaccagctctctgtcatcctccctcagagccgggctgtgctccccaagccaggggtatccagcccccgctcttcatcctaggccgggcaggcagccagccccaggcctgtgtcctccttggggggcggggggtagggacccctcgcgcggggctctcaggcggcttagctgcgtgcggccccaggtcagtcaacgcagcctctgcacctcgccggtcaggtacgcaggccgcgccgggctgccccagacctgcggcgcacacgggaggctcagcctggaatgccgtcctgccctcctccacctgaggaattgccgctcacaccacagggttcagctccgcggcatctcggcgaagcctcctgacatcccgacccccgccgagacctcccctctgagctcctgagcacagccccaggggacccgagctgcgcgctatgcaaacacaggcctgccctcgccctcggtgcgccccgtgcccgccgccccctgggaccgcccgcggtgcgactaggggcctagcccgcctgccccggcatccacgcccctcgagaccgcnnnnnnnnnnnnnnnnnnnnnnnnnnnnnnnnnnnnnnnnnnnnnnnnnnnnnnnnnnnnnnnnnnnnnnnnnnnnnnnnnnnnnnnnnnnnnnnnnnnnnnnnnnnnnnnnnnnnnnnnnnnnnnnnnnnnnnnnnnnnnnnnnnnnnnnnnnnnnnnnnnnnnnnnnnnnnnnnnnnnnnnnnnnnnnnnnnnnnnnnnnnnnnnnnnnnnnnnnnnnnnnnnnnnnnnnnnnnnnnnnnnnnnnnnnnnnnnnnnnnnnnnnnnnnnnnnnnnnnnnnnnnnnnnnnnnnnnnnnnnnnnnnnnnnnnnnnnnnnnnnnnnnnnnnnnnnnnnnnnnnnnnnnnnnnnnnnnnnnnnnnnnnnnnnnnnnnnnnnnnnnnnnnnnnnnnnnnnnnnnnnnnnnnnnnnnnnnnnnnnnnnnnnnnnnnnnnnnnnnnnnnnnnnnnnnnnnnnnnnnnnnnnnnnnnnnnnnnnnnnnnnnnnnnnnnnnnnnnnnnnnnnnnnnnnnnnnnnnnncgggagcggggcggggccggggcggggcgcggaccgtcccccactggctgcggcgcgcggggcagcccaggctcagtgcgcggtggcggcggcgtcgcgggcagctggcgccgcgcggtcctgctctgccggtcgcacggacgcaccggcgggccgccggccggagggacggggcgggagctgggcccgcggacagcgagccggagcgggagccgcgcgtagcgagccgggctccggcgctcgccaggtccgtgcttggggccgggcaggctcgcggaggggtccaacggtgctcgcggaggggtcggggcgcggctgtcgcggaaccacagaggtccctgcagcgggccgggccggggcgcgggcttcccgctcaggaaagtttgccgccgccgccgccctgggagggctttgcagcagccagggagggaaggaggaggagggagggaccgcggcggggaggaggcggccggcgccaggcggcccgggagccctgggcggcggcggcggcgggcggggcggctgggggtcggaggggtcgggacgcaggagccggccaccgccgctttcgtccctgtccgcccctctaacgagctgccttcctcctcctgtagtctcccgagcggcgcccgctcccgccggtgcccgcgccgggccgtggggggcagcatgcccgcgcgccgctgcctgaggacgccgcggcccccgcccccgccatgggcgcccctgcctgcgccctcgcgctctgcgtggccgtggccatcgtggccggcgcctcctcggagtccttggggacggagcagcgcgtcgtggggcgagcggcaggtaagaagggacccactaggcacgggagaggccggcccgtgcgggcagaggcgttggggacgggaaccggccccgggtcggaggggccgccgggtgtgagtgacgccccggggttagagcccggattccgctgcctccttgccggagagcgcggccagagctagcgcggcgacttgtggtgcgcccggagccgcagctaccctccaagtgcgaggccaccacggggagccaggctgggggttggcgtccgcagccccgatcccctgcgactccctagccctggcctgtcgggagggcgcggggggccccatttccacgattcccgctgttgttattcgggttctgcgcagacggaaagttcccattgttggcgtccccctcccccgggccccagtttgtggccagcttcagccaaggcgagagaccggacttctaagggtgggtgtgcgcgtcagcgaagcccggcccctgcccgcccgaagaggcagcagcctccagcgtccccgctgccgaccctgcccctgcctgggggccgagggcgcttccccgtgggtgcgcgccgagctccaggcaagcgaggggcgcgtgtcccagcgtcgcgggccctagactgggctggcggtccaggtcccgcgggacgtcgagggtctgaagggaggtcccaaggggcgaggggaggggaaggggcgcccggccggacctgcacacgcgccgcggttcctcgtgggccgggccgagagctccggtgccgccgccgcgtacacccgctgccggctccggacgggcgaggggggcgcgcacagctcagcccggcggccgcgcggagggaggccttggcccggtgagctcgcgccccacccgggccgaggcccgaacagccgcttctttgtacctcgacgcggccacagaccgcgcattgatggcggctcggcggctcgcggggaggtgtgagcgaccgcgggcgcggcgggccggggagggcgcctggagggccgaggcagatggcgtccgccccgcccgcgcccccgcgcccctttctccgtcggcggctgcagcctcccggaacaatgtcattttttttatgaatgaaagtggcccggcgcttgaatgtgcgtgtcattcagcggcgtgacaggggccgtcgggaggtcagcgcgcgcttttagcgtctgctcgggcggccccgcttccaggggtgccggaggggcggccgcggggggagcttggctttcgcattctcattcagataaagatattactccctacggcccgggaatgtcagccagccccggggaagggcggcggccaggctgcggagcctctcctggaccccctgcgggcgcgcggggcctcccccagtcgctcctggaacgccccgcccacccctcccccggggcggcgcccccgcccgcactggagctggtgaaacaggtagtgagttgatcggtcaataaacttaatccggttccttaacaagatgggccgggcagtaaaaatacaaagacctcgtgaaatggactgaggtctaggctggcgcttgcccgggaacataaattatggagccttggctcgcaggggtcaagggcggtgggaaaggttttggccactggactgccctggccaccccaggccctgccaggacagcccccatctccccagggggccgtattcctggttgggacctggagtgaccccccagggtgcagggaggtacacaaggtcggctctcccacagtcccaccccacccagcaggggtctgggggtgcagggcctttcccgaaggtgctggctgcaacctcccccactcctcctctgcagggctggactttgagccgcgtgggcctctgggtggttcattaacctgggctgagcctggcctccaggtccttgtgtgagcctaggaaccccttgttacccaccccccagctccccagccctcaggtctcacttggggctagatctggggctgtggcaccccttgttacagctgagcttgagtgggagcccaggggcttggggtctcctggaggacggggatctaaagtcacctcatctagggaggcatgcagccctcacctgagtgattcaggagtgaatgagccaggagtggagccacctttggtggggtaggggtcagcctggacctctaggctgccagctcaggctcgggtgccctcttcgaacctcagtttccttacctgtccaagagaaccgataatggcaggctgtttgaaggattaggccagataaccctggcaagccctctttagcctgcccagcctccagatcccttttttccggactttattgtgaaactccaggtggggagacagggaggctggacttttgggggccccctcctcttaggctattttatagctcctacctggcaatacctcctgtaccccagagagctgcagagaacttcatgtgcatccgaaaccagaatgtgttgtttcctgaccccaggccctcatctcaccccaaaacccaaataaacccctggggcagccagctccggaagcgagtctggatttgatccttgttctctggggtcaacccgaggggcttatgatggagcaaggctcccccatcctctcagccatgctccctcacatgcactgggcctccactgcagagacccagagcctggagaaaggttccccaggccagagtttggccgtccccagcaccctgcctaatggacatcagtcttggggccagagacccagggcagggagcgcctctcacccctaccctcactcctgcagccatttcagggcctggtgccctccctgagctcctgggcctgtggggtgggatttttactttgtgccacagtgggggaaactgaggtacaggaccagtgagtggcagagttgtggagactctgggacacagcagagggctgtcgttggcatgtggagcccaagttgaggtcggcactgtgtggggttggggcgccggcaggagcacgtgttgtgggatccatagaagggtgggaggtgggacgcgttgcctcctaccccgccttgggtacagcaggagttttgtctccaacgtgtttgggcaccagtgtctgtgtggtgtcagtggggcctcccttttgtggatcaagaaagaaagaacccttcctagggctgctggggggctatagctctccccatgcctggcagctgggtggggtatgggggctccacccaactgctgacttcccagtgggagtcagaccctgaacttatagcacccactcatgccccgtgtcacactgtccttcacctggtgctcgccacccagcccctgctggggtaccctggcctctgctggcacctagcaggcaggcagtggggggggcagtcagggctgcaccctccccaccacacacgggcagatggccactggtgtggctggcctggggctgctgtgtcccccgtccccccgtgctggaccaggctgaagcaaatacttgtgtggatggcttgacctgttgtcgccactcagaccaaaccggaaccaaccggctgttgcccttgggccagggcctgcagctgaggctgccataaccagcctgttctcggccttctggggggcctcgagcagctcccagctctgggtggtccccacaagacactggccaggaccggagggctggaggtcaggccaggagcccccctgactgcggggtccctacaggggcagtccttgagctgtgggtcccggtggggcgagggctccttcggatgcttcaggggatgagtgtgggcccttctggctggcagggtcaccctgggcactaggcgtgtgtggctggatcaggtgggttgggcagaagagggcctggccgggcagccagggactggtgtggccagagtgggcagctgggcccccgaatctaggccacgcgtctgcagaatgacaagtgatggcgcaacccgcccagctgggtctgaagaaggaggctgcctgggggaccacccacccccgtcccggccccaagcccgggacgcctgcctgcatgcattgtctggccctggcagggaagcctaggggcgattgtccccccagccctgcccatggtgtgtccttgggtcacaggctttggtggctctggggagctgggcagctactggggagggacccaggggccacctgcacatctgcccctgtgggtgggcccccaccccagcttctcagcccccagggaggggccagggctgctgacctgccctggctctcacagcttcctgcccccagcctggtcgtcctctgtgagggggccccagtccccctgcaggcagcaggactccaccccccggcccccttgagggcccgcctgggcctccccactccccggcctgtgagacccacttggccggacccagcgccgtgtttgtactttgctcttctcggtatgttttccgtcatgaccgccgtgtggagcttccataggagctgcaggatacagaaccttgcccaccccaaggagcccccacccccgccccggccccctcgcgctgctccggcctgtgctctgaccggtgaacccgcgcatcgccccccagaccgtccacacggccacgtgaccctgcacctccttccttctcgcctgttctgttccctggctgtccatctgaactgcttttcaggctcatatggggtgcgggggctactgaggacggacccctcctggggtgaatctgcaccacgagggggctggctggccaaccctggcaccccctctgagctccatttcagtcagaggccagcaaagggcagcctgtcccctttgcccgcagcacctgcccgtcgtggtgccgcctgtgagacaagcatggattttatgtttccaagcaattgaacaaattaaaagaacgaagagtcacattttgtgacactttgagatttgaattctccgtgtccatgagtgaagcatcatggggccactgctgtggggttggctgcaggttgtgtggggaaggcggctgtcacaccgaggcagaccggagtccttgggacagactggttggcaaagctgaagatagagacctttggcccttttgggacacagtttccagcccctggtctggtgggaccctggatctgggtcagagccttcctcactcagggccgccgaggcttccactgctgtgtctgtaaacggtgccgggtttgggggtgcctgcctcatggttgcccatcttccccacagaagtcccgggcccagagcccggccagcaggagcagttggtcttcggcagcggggatgctgtggagctgagctgtcccccgcccgggggtggtcccatggggcccactgtctgggtcaaggatggcacagggctggtgccctcggagcgtgtcctggtggggccccagcggctgcaggtgctgaatgcctcccacgaggactccggggcctacagctgccggcagcggctcacgcagcgcgtactgtgccacttcagtgtgcgggtgacaggtgagctctggggccacgccagctacagaaaggagccgagtgccgggctccctgagtccctgcgtgggtcaggagcggctgggggtctctctggtcattggtggagaggagggcacccccaggaagtgctgcccaaatgggggaccctgccccatctgggaggggcacctgggggcctcctggggcaggttgggcattggttgcggccatctctgccttgcagacgctccatcctcgggagatgacgaagacggggaggacgaggctgaggacacaggtgtggacacaggtaggagcagggtccagggttcaggccagccggggtggggcccgctgccaccgccaagccctgcccttcacaggcagctgagggactaaggccccggaacaacctccctggggtcaccccgaaggtctggtcccctcaggatacaggaggggctgggtcactgacatggctctagatgccccaccctggtggcagggctggggtgcaaggggacaccgtgttgctgatggggagactgaggcacagggccctgggggttccaggagcaggaggaggccagggctggcctgtggggctctggtgttggctataggtgaggtggaccccgcagacattagcgcagcagggcagggcactcaggtggctgccgtggggtggatggacccggggtgagggcgccggggcacctgccacaaccagtggcgggcagggtggctggcaggagggtggctggtgggtgggctgcggctgtgagagagcagtcggggacgatgcctggcgtcccggcctggaacggtggcaggtggactttgccaagttgtagggtggggaggtggggcttctggttttggagggagctctgaggggagtgcgtgcaggtgagggtcatcgtggcacagacatggggggcagttacgacttgcggactgatggtgtgtgcgctgggtccctgggccagtggggtaagcaggtgaggaagggaggctgagtccatgagagaaacagctgggggaactcaccctgggggtctccaggaggcctgggagggagctcagcaccgtggggtgcctctttccagcctgtgtccacactgctgcttgctgggcctcagtgcccctgatgggcgtgtgcctggagggggctggcagtgagctcactgaggggagggctgcttccctcctggggaatgccagcccatccttgcctggagtcccggcaggaaggcagcaccagccctgaggaaggagaaaaaccagttgggctgtgagaggggtggtgggagccctggacatcgagatgggaggaggcagggcctccagggtgccaccgtctctgggtgcccgccagacttggagctctgcagagggtggtgtagggtcttgatttccgtgggcccatgctgcccagctgcctccaaggctcctggctctgcaggcgactgggctcctctcctggtaaactgctcccaggtcctggcttgtccactagatgggcctgccccctgggtcttcagtctccccgttggtgggcctggccctggcacgcctctctgggcaggtgggctcccctggacaatgccctgtgccctgtgacttcacaggtccgggcagagcaccctggaggggaggggaggggacacacggcccagctctgagaaagccccggggaggggacaagatgtggaggctcctgggaacctcatcccgccctcttcctacacaggacgggaaactgaggctggggatgggcaggggcagctctgggaagggggttgttcagaggggcctctgctcccactcgggtcatggccttcacacgcacctcggcccgcaggggccccttactggacacggcccgagcggatggacaagaagctgctggccgtgccggccgccaacaccgtccgcttccgctgcccagccgctggcaaccccactccctccatctcctggctgaagaacggcagggagttccgcggcgagcaccgcattggaggcatcaaggtgggcgcggcggggtggctctgggcctggcaggcgcggtggttgctgcctccgctcactcacccgcccgcgtcccggtgcagctgcggcatcagcagtggagcctggtcatggaaagcgtggtgccctcggaccgcggcaactacacctgcgtcgtggagaacaagtttggcagcatccggcagacgtacacgctggacgtgctgggtgagggccctggggcggcgcgggggtgggggcggcagtggcggtggtggtgagggagggggtggcccctgagcgtcatctgcccccacagagcgctccccgcaccggcccatcctgcaggcggggctgccggccaaccagacggcggtgctgggcagcgacgtggagttccactgcaaggtgtacagtgacgcacagccccacatccagtggctcaagcacgtggaggtgaatggcagcaaggtgggcccggacggcacaccctacgttaccgtgctcaaggtgggccaccgtgtgcacgtgggtgccgccgctggggctcctgggctggccccaagggtgccccttggctgcgggttgcgtgaggatttgggtctaggggttggagcttcgggggcagaagctgtgggggtgcttgtggggccaagtctcagccaccccacacctcagggccataggcagctgcgttgggacccgtttccgtgtctgcagagggccagcctcagccactgaagtccctgacatggagctgcccacgggcttcttgggggtgggtgcggcttgggcagcagtggtgccccaggacaggagggcagtgtggccaagccctccaggccccctctgggcctcagaggcggtggctgagccccgacctggccgattggctctcgtcagctgtgtgcagtggggcccgagctcactgtctgcccgcctcctgaagcccttagctttgttcccatggctgccgggtgggggccactgaattgggacggttgcgacactcaaagcccaaagagaaacatctattcagagagaagacggtctcttgggggcggggagcaggcgcagggcgagggtggagtccagaccccgcccagagaggccgcctcgggccctgtccagggtgcaggttctgcaagagcccgggggagggcaggccagtgaccagaggttgtctgagggtctgggctgggttgttggggtggaggcagagacgtgcatcctgtgaaaccacagccaccgtgaagtgcctccacgcctcctccaggcagcctttggggctgacgcagcccagcctcgatctgtaccttgggggtctcccacatcctgcctcgtgcccggcggggctgcctcgggggcgtgcctgagccgggtctcttgtccccgcagtcctggatcagtgagagtgtggaggccgacgtgcgcctccgcctggccaatgtgtcggagcgggacgggggcgagtacctctgtcgagccaccaatttcataggcgtggccgagaaggccttttggctgagcgttcacgggccccgagcaggtaacgactctgtcccatgccggccggcacaagagctccagctccaaggccctggccgcgcgccctgcacgccccgcacgcccagccctgctcgctcccgccccggctcgcgctccactcggggccgcctcggcaaggctggcagctccagcctccacggtgaccgcccgcttcgagccctgtggcctgcgccgacccttcccgcacgcctgcgacccccacaggaggtgcccggtgcccaccgggccggctccgtgccgtctgtgagcacccctttgcgcctctctccacccctgcccgctgcctgctcgcttccgcagcctgtgtgtccctgtgtccatcctccacctgcacccgcccggctctgcgctaacccgcatgctgcctgcccgcctgccgctcacctgggacagaggactcgccggtggaggggcctggcttcgggctcagtaccggtgtaccaggcggagggccctcagccgcgtggcggtgaccaagttggcgatggctgaggagttggtggtggcggcgttttccttgcagcggctggatcctgccgtgtggactctgtgcggtgcccgcagggcggtgctggcgctcgcctatcgctctgctctctctttgtagacggcgggcgctaacaccaccgacaaggagctagaggttctctccttgcacaacgtcacctttgaggacgccggggagtacacctgcctggcgggcaattctattgggttttctcatcactctgcgtggctggtggtgctgccaggtaccggcttctgctgctgctgctgctccgcactgtctgggggacgctggctcgggacacgccaaagctgccaggacggacgggaatcctgtgacttacggccgtcccgcttcttgagccctcactcctggccctgtgcccagtgtggggacaaagttggcctggcccggtcctggtcccagaggggccccctcagccccctcgagcccacttcccatctgggtccccaaaggcctctcctgtggctctggtgtctcccgggcgcctggtggcggtgtgggactggctggctctgctgggctccttctctccagggtctggccctctagactcactggcgttactgactgcgagaccctccagacaaggcgcgtgctgaggttctgagcccccttccgctcccagtggtgcctgcggctctgggccaggggcatccatgggagccccgtgggggggggggccaggccaggcctcaacgcccatgtctttgcagccgaggaggagctggtggaggctgacgaggcgggcagtgtgtatgcaggcatcctcagctacggggtgggcttcttcctgttcatcctggtggtggcggctgtgacgctctgccgcctgcgcagcccccccaagaaaggcctgggctcccccaccgtgcacaagatctcccgcttcccgctcaagcgacaggtaacagaaagtagataccaggttctgagctgcctgcccgccaggcctcctggagccccacctcggcccacgctggtcctgggctgtgtgagccctctctgcagccaggcgggctcccctctcctcgtctctgctcaccatgtagagcctagggtactttggggcacgaaacattctaaaaatcttcattcaatgctggtggaagtcagaacgcccccccttctggcccagcactgacccccggctgtacctccacgccctgtcgcccacgcggcgccaacctgcccctgctgacccaagcaggtgtccctggagtccaacgcgtccatgagctccaacacaccactggtgcgcatcgcaaggctgtcctcaggggagggccccacgctggccaatgtctccgagctcgagctgcctgccgaccccaaatgggagctgtctcgggcccggtcagtggtgctgagggccagcgttggctgtagggggcttggtggtgggggtgaaacagccaccagtcagaggcccggctgggtttaggggccgtcagggatgtggcggatgttgggtgtggctggggttctgtggacatgctcctgggacgggtgtatggcagggactgcccctctcaaggtgccctgtctggaggggcagcaagggcgggaggctgtgggtgacactcttcgtccttacgagcaggctgtagggggagcatggagggcttcctggaggtggtggctctgggcctcaagggctgggccaggctggggtggggaccgtggtgggctgagagtgggcgagtttgcacactcatggtccctctgcctccactgccaggctgaccctgggcaagccccttggggagggctgcttcggccaggtggtcatggcggaggccatcggcattgacaaggaccgggccgccaagcctgtcaccgtagccgtgaagatgctgaaaggtgaggagggggcggccaggggtgcagagcagggctgggggcgccgccgccgcctgacacaggccccccgctccgtgcacagacgatgccactgacaaggacctgtcggacctggtgtctgagatggagatgatgaagatgatcgggaaacacaaaaacatcatcaacctgctgggcgcctgcacgcagggcggtaggtgcggtagcggcggtggtgccggctgggcggccctcctgggcctggcagcccgtctgaggagcccgtgtccccagggcccctgtacgtgctggtggagtacgcggccaagggtaacctgcgggagtttctgcgggcgcggcggcccccgggcctggactactccttcgacacctgcaagccgcccgaggagcagctcaccttcaaggacctggtgtcctgtgcctaccaggtggcccggggcatggagtacttggcctcccagaaggtgggcagggcggcaggtgtgggtggagtaggctgggccctgccctgagatgctgggagcagcggggagaggtggagaggcttcagccctgcctcccaccccttccccagtgcatccacagggacctggctgcccgcaatgtgctggtgaccgaggacaacgtgatgaagatcgcagacttcgggctggcccgggacgtgcacaacctcgactactacaagaagacaaccaacgtgagcccggccctggggtgcgggggtgggggtcatgccagtaggacgcctggcgccaacaccgccttcccacaccctcccagggccggctgcccgtgaagtggatggcgcctgaggccttgtttgaccgagtctacactcaccagagtgacgtgtacgtgtcctgcagagctcaggcttcaggggtggaggcgggaactgggcagagccaggaccccagctgcagtccccaggcctgtgccctggagctcctgggtgtggtttctacccctccctgggggcagcagcgcagccctggcctattcccctggtgcccgcccaggtgtctgtcctgggagtctcaggacagcctgacctcaccttcccctgcagctggtcctttggggtcctgctctgggagatcttcacgctggggggctccccgtaccccggcatccctgtggaggagctcttcaagctgctgaaggagggccaccgcatggacaagcccgccaactgcacacacgacctgtgagtggcatccctggccctccactgggtcctcaggggtgggggtccctccggggctgggcgggggagggactggcagcccttcaggctgttcccgaataaggcgggaagcggcggggctcactcctgagcgccctgcccgcaggtacatgatcatgcgggagtgctggcatgccgcgccctcccagaggcccaccttcaagcagctggtggaggacctggaccgtgtccttaccgtgacgtccaccgacgtgagtgctggctctggcctggtgccacccgcctatgcccctccccctgccgtccccggccatcctgccccccagagtgctgaggtgtggggcgggccttctggggcacagcctgggcacagaggtggctgtgcgaagaggggctcggtggcacagcgctcaccccgcctcccgccagcaggagtacctggacctgtcggcgcctttcgagcagtactccccgggtggccaggacacccccagctccagctcctcaggggacgactccgtgtttgcccacgacctgctgcccccggccccacccagcagtgggggctcgcggacgtgaagggccactggtccccaacaatgtgaggggtccctagcagcccaccctgctgctggtgcacagccactccccggcatgagactcagtgcagatggagagacagctacacagagctttggtctgtgtgtgtgtgtgtgcgtgtgtgtgtgtgtgtgcacatccgcgtgtgcctgtgtgcgtgcgcatcttgcctccaggtgcagaggtaccctgggtgtccccgctgctgtgcaacggtctcctgactggtgctgcagcaccgaggggcctttgttctggggggacccagtgcagaatgtaagtgggcccacccggtgggacccccgtggggcagggagctgggcccgacatggctccggcctctgcctttgcaccacgggacatcacagggtgggcctcggcccctcccacacccaaagctgagcctgcagggaagccccacatgtccagcaccttgtgcctggggtgttagtggcaccgcctccccacctccaggctttcccacttcccaccctgcccctcagagactgaaattacgggtacctgaagatgggagcctttaccttttatgcaaaaggtttattccggaaactagtgtacatttctataaatagatgctgtgtatatggtatatatacatatatatatataacatatatggaagaggaaaaggctggtacaacggaggcctgcgaccctgggggcacaggaggcaggcatggccctgggcggggcgtgggggggcgtggagggaggccccagggggtctcacccatgcaagcagaggaccagggctttttctggcaccgcagttttgttttaaaactggacctgtatatttgtaaagctatttatgggcccctggcactcttgttcccacaccccaacacttccagcatttagctggccacatggcggagagttttaatttttaacttattgacaaccgagaaggtttatcccgccgatagagggacggccaagaatgtacgtccagcctgccccggagctggaggatcccctccaagcctaaaaggttgttaatagttggaggtgattccagtgaagatattttatttcctttgtcctttttcaggagaattagatttctataggatttttctttaggagatttattttttggacttcaaagcaagctggtattttcatacaaattcttctaattgctgtgtgtcccaggcagggagacggtttccagggaggggccggccctgtgtgcaggttccgatgttattagatgttacaagtttatatatatctatatatataatttattgagtttttacaagatgtatttgttgtagacttaacacttcttacgcaatgcttctagagttttatagcctggactgctacctttcaaagcttggagggaagccgtgaattcagttggttcgttctgtactgttactgggccctgagtctgggcagctgtcccttgcttgcctgcagggccatggctcagggtggtctcttcttggggcccagtgcatggtggccagaggtgtcacccaaaccggcaggtgcgattttgttaacccagcgacgaactttccgaaaaataaagacacctggttgctaacctggccctgtgctttctgtctccagttctgggataggggagggaggggtcactttgccaggtggtcccagttgcgcgggatggatgctggcagcagcaccgaaagtcactggtgggctgggagccccaagagcaaggaatgtttatgggaggggcctggcggaagggagcagggtgcctgggggtgcactgccctggctgctcccagcttgtgggttcctgaggtggtggtggtggtggggagggtcctttctcactagctctgaggcagaccttctctcatcaccccactcctggcatccgccttcccagtcagctggggagctttctgggcatccctctatggagccaaaagcaagcaaagccctcatggggccctgggggctacacaggcggtcactctcctccagatcagctctctgccctcccaggccgggcaaccagtgcccccactgccttgggctccatcagggtcccctacagtgataaagcacctttgggcagatgaggtgctgagaacccagagatggaaccaggcccttgcccaagttcatagccctagcagggtgggaggacaacatggtgagagcaagtctgggaaggcttcctggaggaggtgtgccgtctctcctgactccccaccaccctctttgctgtcctcccttctgctatcctccctctcttgtcctcccgtttttcccatctctgctgtccccacctctgtcgtcctccttctgctctcctccccccatcccctctgctctccctacctctgctgtcccctctgccgtcctccctctgctctcctcccctctgctggctcaagagcagggtttcccaaccatgagctgcatgaactctagcttctaaaatgctctggctacaaactcacctttcaggtcagggggtactgctggcccgtttcctgggcaggcaagggtttaactcaaccccattcagggaagcacgtgtgggcgcaggcctggtggaagtggccttacaagggactctgcatccctaatgcccccacttgcccagaaaccctatgctgggccccagaggcaggcctggccatgggacgcctggtgacagtggcaggatggggaggcccacatgggcctgaaggctgaggcctgcagggcagtggggggaccaggccaacaggcaggcagtgccagcatccacaccaaggcaggcagagcatggggctcgaagcgcgggccgggagcgccccctagcgctggctgggcagtgtccctgctacaaacccaaggcccctctcctgtcagggctctggtggacctctggtgggcacagtgggatcctgaatgggtgctggggaccaaagggctgggccaccgggagaacagtggcccatgaaggtgctggtgggccagccccctcctcctcagcgtgcttccttagcgaccccagatggcagggcacagtccctgaagctgccccaccaggggctccctggctgcctccccgtcccataaggtgagcccatgagagaccccagctgtcagcacaactgaacctccgccatcagggtgccctctagtggttgggtgtgctctaggctggcagggtccccgcccttgctgtctgctgatggctgagggggacatgtctcatgggaggcccagcttccaggacacaactggtggctcctggggtcaccaagggcacctggtttgttcacagctctttgggctgctgtccccatgagggagcacctcccaccccagctgtgggtccatcatttcctctgattaattagggcctaggggtcaagggaggccccgagggaggactctcagtgtgaacaaaccagcagccagggccgcagagaagcctgtgaggtgcccacagggcctggtcccagtgtgggcagagcacctaagggatggcttctgtccactgagaagggtcgggagccaagacaccacactgctatcctggcgctggaaccatccacgcactcctgcagccaggccacgctgaggcaggtaggcacccagaggtccgggctgggggctgctctccatggccccaggccatcacacatccctcagggcgtctgggccctgcctgtgggctggactgcaggctgaaggccctgcctcatccaggactccctagggcagtactcggtgctctttcccctcagcggcctgaggagtctttcagaagagctggccctcctgggtgacacctcggcgagggtcccagcccctaaccccaggactcccaagaagtcactgaggtccccagagcagggagagcatgaccaggtggcagggccactggcctggagaacgtcccacactgttccatgagcagctcacgctgtcacaggacctggggacgtgggtctcctgaccctgcaggcccatcctgcagagcaggaagcgtgaagccaagggctgaacccatggagggcagcccagcactcaaacccccagggatggtgaggctccttctggaactggcctcacagccacacgcgccccaaggcccagcccctgcagccacgtggacagctctgccggcttccactcgctcctgtgtgcccaacggttcagaaatattattactctgcactgttacaggaacacagatttgatgttttaataaaaatacgatttctacaaaaggtgcttaacacggcccaggacgggctgtccggtggagtcagccgtaggacccctgaaggatttacaaagacagagccggctcaccagcacactcctgccagcaccgggacccactgcgaacaaagacagagccggctccccagcacgctcctgctagccctgggacccactgtgagccactgcggggtgtccttcatttaaaaaaagtctggactgtgacactgcagaaggagtctgaaagcccaattcctgaatccctgcgttagaactgagagttcaggccgggcgcggtggctcatgcctgtaatcccagcactttgggaggctgaggcgggtggatcacctgaggtcaggagttgaagaccagcctgaccaacatgatgaaaccccatctctaataaaaacttgcccgtaatcccagcactttgggaggccgaggtgagtagatcacgaagtcaggagatcgagaccatcctggctaacacggtaaaacactgtctctaataaaaatacaaaaaaattagccaggtgtggtggcgggtgcttgtagtcctggctactcgggaggctgaggcaggagaatggcgtgaacccaggaagcggagctggcagtgagccgagatcacgccattgcactccagcctgggagacagagcaagactctgtctcaaaaaaaaaaaaaaaaaattagctgggcatggtggcgcatgcctgtaatcccaattactcaggaggctgaggcagaagaatcgcttgaacccgggaggtggagcttgcagtgagccgagatcgcaccactgcactccagcctgggtgacagagcgagactctgtatcaaaaaaaaaaaaaaaaaaaaaaaaagtgagtgcttagctggagtgaggaggaaacactgaattcctaaatcaggaattcgtttcattttcaccaggcgcagatatcctagctcctgaaaaaggccaagaccgagggtctggccctgggcaggtgtaagaaaggactgttttaagaagcttattacacaaagctcatatttctggatccaccactgcttacatttgcacccagacaccacttttaggtgcaagaagaaaggtcaggacatagagaaaaatgcacacagaacgatgagggagaatgacgagggagaatgacgagggagcaagcctgcatcagagcacggctgatgtcacggaagccaccaaaggcacccaccagagccttccccacctgcaaagcccctgcagcacccggagggcaagctggcttttggaggccatgcggagtccagggcagaggggacagtgggatgggctgcctgttgcagtggctgttcacgtcaacagtgctcagccaaggcagtgaggacgaggatgagagccggggcagctgactgggcccgcgatgccgctcacaggagaggcgtctgcacacacctggcaactgcaagacttgttctcaagggtaagtacacttggacaaacgaacaccaggctacttacacagggtgagagaattcataaatattagttaaggatctaaaacaaacttctcaaataactgaaagctgaaagcctctggaagccaactgtccctgcacaaaggtttacaattgagaaatatctcctgttcctattttgtcaagtttctttaatggctgaacagaaagaagcttcaagtaatggagaaggcattgtctgagtgcagctgctttcctggacgcctgtgccgttcctgtcttccaaatcctatgcttggaggcccctggaggtacatttttgccaggaaccaacctgaccttaaaaagatgagtgtgacacagccggctgggcaggaggatggaggtgccacaggacaccacctgcccacgccctggccagcctggccatgctgccgagtgcggggaggccaccccacccagagggcacagggcaaaccctaagcacgggggtattgcccttgaagccccaggggatgccctgtgccggatcctcatgcctcattgactagcctgcttgctgaaggagcccaggggcctgagcctgcaacactgcaaggggtgagaagggcatgctgctgtgggcgcactggactcaaacctcacattagaagctacaaagaaccccaaatgcgcttcagagccccaccaacccccaagccaggctcatccctgacacagtgaatccactgcagcccccgtgggaaactctgtgccaattgactgcttaaagaactgggggaaatagaaagccgagaaagagctccgatacacaagggaaaccgcacgtgagaaccagcactcccagcagggagacgtcactctccagaggccacagagatggcagacacctctgtctccacaatgacccacatccaactgaaagtgtgcaggaagacaggtctattgacactgaaatctagaaatcaaggtccacaggcgaatggaggcatcttcagccctgaggaggccaggctgtgtctcctgacgcccctgagggtgggcacagcagccagctctgtgtgggcggagtccacgtggtcctcattctcttccctggggacagggcagcacagtcagatgctgagactgaggccacacacatgggggcgccttcctgccttggcccggcccagctgcctctggagccaggaggccgtggcagccacaccacagtgtggatccagacacgattctgtggaggggttccgggattccagacagactgaatctccatggaatgatgaaaattaaaatttacttgattatggaagtctctgatttattccagccaaaatattagatgagccactgagaatcaccacaaagcaatcgccctcacggcccttgccagggtgacggcacagcaggaggacaggtgcccaggccagtggttctagctcttcacctctgcgacctccttctctgccttctctttggccttctccttctcctccaccttctcctctttttccagtgttgctacaatctcagccacctggctggtggagatgtgaacatcttctttgtccaccagctcaatcacctacacacgtgggaaagggagaggctcaggtggctgcgccctacagcacagtgaggcagaggcggggccagcgccgtcagtcgccccagctggggtggcagcagcatgcacgcaatcactgcctgcgggccccagggtcctcagagcaccaattcccccaaggggtgccacagaccctggggaaggggctcagagtgggaggacaaaggagccagggggctgccttgacaggtggcagacagcacaatggggctgccagggtcaagttcctgctctggccaggaacctgggccatggcttcccagggcagagtggggtgacatgcagggaccttgtccccactctgccacccagactagcagggaagggaagggcagctgtgcagtagacacatgatccttgcttccaaactgaactgcaagaaaccagccaacacttctgttagacgtctggaaaatcactaacctgatgcatgcaccgggagccacgaggcagcttcccctcagagatgtcagtgattgggaaaattggtgtgcgcactcaggctagagccctgccttccctccagagactggatcctgggccagggtctccggggctaccctggaacctgagtggctgcacttgggagctcagcccagcagtcacctctcagccttggggcggtgcccaagctgccccgcggctcccctgtgtagttgcctctcagctttgggggcccccggcaggtgtgaagtgcccccaggctccctgtgcagtcgcccctcagcgtcgggggcccctgagaggtgtttgctgcacccccccggctccccagtgccaccagctgggggcggggtccagggacatgcgtagccactaggtgcgttttctctctcaacacttgagttgtaacttcaataatttctcacttctgatgtttcaaatgagagcagcggcttaaaggagcagtcgcagtgacagacccaaacccctgacaggagggggtagctgcccaggagggtgccggacatgcaatgaacagtccccctgccccaccccactccagagcaggtggcggatggcctgcgtggtccccagcgaggcccaccttgacgaggtcgtcgatgttgaccttgccatccttgttttcatccagtgctgcggccaggctggtgagcttgctttcgggaatgtgcttgacttgcttcatggcgttgatgagctcagcgacactgatgacgttctccctgtggaagcacagcctgcatgtggccacgggcaggcgtcctgccacacagggcctcactgcccacacctgtggctgcaagtggtcagcactgacacaggcggctccgcgtgagccaggcaacctccagcacggacccccaaggtatgatcccatcctgcatacaatgccaagagctcccagggccagcgtggacacaaacacagaaacaccaccaggtccagggtttccacgggcatgtctgcccctcagtggctgcccctctggggccatggctgctgggctgttgtcctcaggcctgtggccacttggcaatacgttcacgatcatgggggctgtggtgccctgggcagatgagggcctccaagagcagggacgagagcatgagcagggtgccacgtgcagcccacctacaacactgtgggtgtggaggtggagatttgaacctgcagggcaccagcagtcacccaacagctgtttcattcgcccagaagggactcacaaaacggcagctccctcagccactgctgcgcaggaatctgggacatgtcgggcacagagaaggccgactgcccgagctggtgtcattactgagcgtgggtggggtcaggaagagggagaggcaagagagagcctggtaattagaggaaacagaagccaacagaggtggaggttggagcgggaggagagggggctgtgggaagaggaagaggggccaggaagggacgaactgctctcggagaggcagagactgacatgccagagggttcctggctgggactgctggtcaaaggtggagaggcagccaggcagaggctacaatgtgccctttggagccagaagggcccagctcggatccagcaaagggaccagcctccctatgtgagtctccgatccctctcccgcgcccaccaccccactcaccccgtgggcatgccgttggccggggccagcttgccagcctgctggtccatctccagctgcgagatcaagccatcgatctgcccgatcatttgctgcaccctttttgtcaatctcttgctggctttagattcttccacgtatttttcttcaccagtctttgaaagttccttcttgatctcctgcaagtcctaataaaattattttggttgtaaaaagtttgtcttaaaagaaaaagggggtcaggtgtagtggctcacgcctgtaatcccagtactttgcaaggccaaggcgggcggatcacctgaggttaggagttcgagaccagcctggccaatgtggtgaaaccccgcctctactaaaaatacaaaaattagctgggcatgatggcaggcacctgtaatccagttacttgggaggctgaggcaggagaatcgcttgaacccaggaggcagaggctgcagtgagccaagaccatgccaacgcactccagcctgggcaacagagcgagactctgtctccaaaaaaaaaaaaaaaaaaaaaagaatctggttgggcacagtgactcatgcctgtaatcccagaactttgggaggccaaggcaggaggatcacttgaggacaggagttcgaaaccagaccaggcaacatagcaagactttatctctaccaaaattcaaacaaaaaattagccaggcgtggtggtgcacacctgtagtgccagctacccaggagtctgagacaggaggatggcttgagcccaggaggtggaggctgcagtgagccaagatcacatcactgcacttcagcctgagtgacagagcgagaccctatctcaaacaacaacaaaaaaaggtaataaattaacttgtaaaggtaattaaacccattaattcaaaccagagagttataaaattgtatttctatcatacaaatttcttatttttgtacactgccttgcaagcaaaagacatagaatctattctgaatctcaatttccttcacatttgttaaagaaaaattaagtgaactaattaatcaaggaaattaagtgtctttgttttttgagatagggtcttgctctgtcacccagactggagtaaagtggcatgatctcagctcactgcagcctccaactcccagcctcccactcccaagcaatcctcctgcctcagtctctggagtagctgggagtacaggcacacaacatcatgcctggctaatttttgtattttttgcagaaatggtgtttcaccatgttgcccaggccggtctcaaactcctgagctcaagtgatcctcctgccttgacctccccaaagtgctgggattacaggcctgagccaccagtgcccagccttaagtgtctttttaaattccaagttgtttttttcccacgagtaaacaccatgaggaagaatggggaaggcgaggggaggggagggaaggaacaggctgagctggtgataagcacctcacatccagtggagaacccacatggcatgagggctgtcataaatctagaaatggccaattatttttgccaattgaaaaatcagttatcattcccaacagagctatgaaaacagtttttaaaaaatcgtattaggggccgggcacagtggctcatgtttgtaatcccagcactttgggaggctgaggcgggtggatcatgaggtcaggagttcgagaccagcctggtcaacatggtgaaaccctgtctctactaaaaatacaaaaaattagccaggcatggtggcacatgcctgtagtcccagctactcaggaggctgaggcagaagaatcatttgaacccaggaggcggaagttgcagtgagtcgagatcacgccactgcactccagcctgggcgacagagctagacttcgtctcaaaaaaagaaaaaaagaaagaaagaaagaaaaaaaatcgttattaggaagtaatatttacaaaaaaagggaaacaaaccaccatggaagaaaagaaaaaagccactttcacgtaatcatgaataagatctcgtcaagtgaccaaactcttcatgagacaccttcccatgtttagaaactaaaagatgtggccaggcacggtggccacgcctgtaatcccagcactttgagagggcgaggcaggtcggtcacctggggccagg

SEQ ID NO: 188 - DNA, 3391 bp, Homo sapiens
gtcgcgggcagctggcgccgcgcggtcctgctctgccggtcgcacggacgcaccggcgggccgccggccggtgcccgcgccgggccgtggggggcagcatgcccgcgcgccgctgcctgaggacgccgcggcccccgcccccgccatgggcgcccctgcctgcgccctcgcgctctgcgtggccgtggccatcgtggccggcgcctcctcggagtccttggggacggagcagcgcgtcgtggggcgagcggcagaagtcccgggcccagagcccggccagcaggagcagttggtcttcggcagcggggatgctgtggagctgagctgtcccccgcccgggggtggtcccatggggcccactgtctgggtcaaggatggcacagggctggtgccctcggagcgtgtcctggtggggccccagcggctgcaggtgctgaatgcctcccacgaggactccggggcctacagctgccggcagcggctcacgcagcgcgtactgtgccacttcagtgtgcgggtgacagacgctccatcctcgggagatgacgaagacggggaggacgaggctgaggacacaggtgtggacacaggggccccttactggacacggcccgagcggatggacaagaagctgctggccgtgccggccgccaacaccgtccgcttccgctgcccagccgctggcaaccccactccctccatctcctggctgaagaacggcagggagttccgcggcgagcaccgcattggaggcatcaagctgcggcatcagcagtggagcctggtcatggaaagcgtggtgccctcggaccgcggcaactacacctgcgtcgtggagaacaagtttggcagcatccggcagacgtacacgctggacgtgctggagcgctccccgcaccggcccatcctgcaggcggggctgccggccaaccagacggcggtgctgggcagcgacgtggagttccactgcaaggtgtacagtgacgcacagccccacatccagtggctcaagcacgtggaggtgaatggcagcaaggtgggcccggacggcacaccctacgttaccgtgctcaaggtgtccctggagtccaacgcgtccatgagctccaacacaccactggtgcgcatcgcaaggctgtcctcaggggagggccccacgctggccaatgtctccgagctcgagctgcctgccgaccccaaatgggagctgtctcgggcccggctgaccctgggcaagccccttggggagggctgcttcggccaggtggtcatggcggaggccatcggcattgacaaggaccgggccgccaagcctgtcaccgtagccgtgaagatgctgaaagacgatgccactgacaaggacctgtcggacctggtgtctgagatggagatgatgaagatgatcgggaaacacaaaaacatcatcaacctgctgggcgcctgcacgcagggcgggcccctgtacgtgctggtggagtacgcggccaagggtaacctgcgggagtttctgcgggcgcggcggcccccgggcctggactactccttcgacacctgcaagccgcccgaggagcagctcaccttcaaggacctggtgtcctgtgcctaccaggtggcccggggcatggagtacttggcctcccagaagtgcatccacagggacctggctgcccgcaatgtgctggtgaccgaggacaacgtgatgaagatcgcagacttcgggctggcccgggacgtgcacaacctcgactactacaagaagacaaccaacggccggctgcccgtgaagtggatggcgcctgaggccttgtttgaccgagtctacactcaccagagtgacgtctggtcctttggggtcctgctctgggagatcttcacgctggggggctccccgtaccccggcatccctgtggaggagctcttcaagctgctgaaggagggccaccgcatggacaagcccgccaactgcacacacgacctgtacatgatcatgcgggagtgctggcatgccgcgccctcccagaggcccaccttcaagcagctggtggaggacctggaccgtgtccttaccgtgacgtccaccgacgagtacctggacctgtcggcgcctttcgagcagtactccccgggtggccaggacacccccagctccagctcctcaggggacgactccgtgtttgcccacgacctgctgcccccggccccacccagcagtgggggctcgcggacgtgaagggccactggtccccaacaatgtgaggggtccctagcagcccaccctgctgctggtgcacagccactccccggcatgagactcagtgcagatggagagacagctacacagagctttggtctgtgtgtgtgtgtgtgcgtgtgtgtgtgtgtgtgcacatccgcgtgtgcctgtgtgcgtgcgcatcttgcctccaggtgcagaggtaccctgggtgtccccgctgctgtgcaacggtctcctgactggtgctgcagcaccgaggggcctcggcccctcccacacccaaagctgagcctgcagggaagccccacatgtccagcaccttgtgcctggggtgttagtggcaccgcctccccacctccaggctttcccacttcccaccctgcccctcagagactgaaattacgggtacctgaagatgggagcctttaccttttatgcaaaaggtttattccggaaactagtgtacatttctataaatagatgctgtgtatatggtatatatacatatatatatataacatatatggaagaggaaaaggctggtacaacggaggcctgcgaccctgggggcacaggaggcaggcatggccctgggcggggcgtgggggggcgtggagggaggccccagggggtctcacccatgcaagcagaggaccagggctttttctggcaccgcagttttgttttaaaactggacctgtatatttgtaaagctatttatgggcccctggcactcttgttcccacaccccaacacttccagcatttagctggccacatggcggagagttttaatttttaacttattgacaaccgagaaggtttatcccgccgatagagggacggccaagaatgtacgtccagcctgccccggagctggaggatcccctccaagcctaaaaggttgttaatagttggaggtgattccagtgaagatattttatttcctttgtcctttttcaggagaattagatttctataggatttttctttaggagatttattttttggacttcaaagcaagctggtattttcatacaaattcttctaattgctgtgtgtcccaggcagggagacggtttccagggaggggccggccctgtgtgcaggttccgatgttattagatgttacaagtttatatatatctatatatat

SEQ ID NO: 189 - protein, 686 aa, Homo sapiens
MGAPACALCVAVAIVAGASSESLGTEQRVVGRAAEVPGPEPGQQEQLVFGSGDAVELSCPPPGGGPMGPTVWVKDGTGLVPSVLVGPQRLQVLNASHEDSGAYSCRQRLTQRVLCHFSVRVTDAPSSGDDEDGEDEAEDTGVDTGAPYWWERMDKKLLAVPAANTVRFRCPAAGNPTPSISWLKNGREFRGEHRIGGIKLRHQQWSLVMESVVPSDRGNYTCVVENKFGSIRQTYTLDVLERSPHRPILQAGLPANQTAVLGSDVEFHCKVYSDAQPHIQWLKHVEVNGSKVGPDGTPYVTVLKVSLESNASMSSNTPLVRIARLSSGEGPTLANVSELELPADPKWELSRARLTLGKPLGEGCFGQVVMAEAIGIDKDRAAKPVTVAVKMLKDDATDKDLSDLVSEMEMMKMIGKHKNIINLLGACTQGGPLYVLVEYAAKGNLREFLRARRPPGLDYSFDTCKPPEEQLTFKDLVSCAYQVRMEYLASQKCIHRDLAARNVLVTEDNVMKIADFGLARDVHNLDYYKKTTNGRLPVKWMAPEALFDRVYTHQSDVWSFGVLLWEIFTLGGSPYPGIPVEELFKLLKEGHRMDKPANCTHDLYMIMRECWHAAPSQRPTFKQLVEDLDRVLTVTSTDEYLDLSAPFEQYSPGGQDTPSSSSSGDDSVFAHDLLPPAPPSSGGSRT

SEQ ID NO: 190 - DNA, 1084 bp, Homo sapiens
gtcgcgggcagctggcgccgcgcggtcctgctctgccggtcgcacggacgcaccggcgggccgccggccggtgcccgcgccgggccgtggggggcagcatgcccgcgcgccgctgcctgaggacgccgcggcccccgcccccgccatgggcgcccctgcctgcgccctcgcgctctgcgtggccgtggccatcgtggccggcgcctcctcggagtccttggggacggagcagcgcgtcgtggggcgagcggcagaagtcccgggcccagagcccggccagcaggagcagttggtcttcggcagcggggatgctgtggagctgagctgtcccccgcccgggggtggtcccatggggcccactgtctgggtcaaggatggcacagggctggtgccctcggagcgtgtcctggtggggccccagcggctgcaggtgctgaatgcctcccacgaggactccggggcctacagctgccggcagcggctcacgcagcgcgtactgtgccacttcagtgtgcgggtgacagacgctccatcctcgggagatgacgaagacggggaggacgaggctgaggacacaggtgtggacacaggggccccttactggacacggcccgagcggatggacaagaagctgctggccgtgccggccgccaacaccgtccgcttccgctgcccagccgctggcaaccccactccctccatctcctggctgaagaacggcagggagttccgcggcgagcaccgcattggaggcatcaagctgcggcatcagcagtggagcctggtcatggaaagcgtggtgccctcggaccgcggcaactacacctgcgtcgtggagaacaagtttggcagcatccggcagacgtacacgctggacgtgctggagcgctccccgcaccggcccatcctgcaggcggggctgccggccaaccagacggcggtgctgggcagcgacgtggagttccactgcaaggtgtacagtgacgcacagccccacatccagtggctcaagcacgtggaggtgaatggcagcaagacggcgggcgctaacaccaccgacaaggagctagaggttctctccttg

SEQ ID NO: 191 - protein, 307 aa, Homo sapiens
MGAPACALCVAVAIVAGASSESLGTEQRVVGRAAEVPGPEPGQQEQLVFGSGDAVELSCPPPGGGPMGPTVWVKDGTGLVPSVLVGPQRLQVLNASHEDSGAYSCRQRLTQRVLCHFSVRVTDAPSSGDDEDGEDEAEDTGVDTGAPYWWERMDKKLLAVPAANTVRFRCPAAGNPTPSISWLKNGREFRGEHRIGGIKLRHQQWSLVMESVVPSDRGNYTCVVENKFGSIRQTYTLDVLERSPHRPILQAGLPANQTAVLGSDVEFHCKVYSDAQPHIQWLKHVEVNGSKTAGANTTDKELEVLSL

SEQ ID NO: 192 - DNA, 4173 bp, Homo sapiens
gtcgcgggcagctggcgccgcgcggtcctgctctgccggtcgcacggacgcaccggcgggccgccggccggtgcccgcgccgggccgtggggggcagcatgcccgcgcgccgctgcctgaggacgccgcggcccccgcccccgccatgggcgcccctgcctgcgccctcgcgctctgcgtggccgtggccatcgtggccggcgcctcctcggagtccttggggacggagcagcgcgtcgtggggcgagcggcagaagtcccgggcccagagcccggccagcaggagcagttggtcttcggcagcggggatgctgtggagctgagctgtcccccgcccgggggtggtcccatggggcccactgtctgggtcaaggatggcacagggctggtgccctcggagcgtgtcctggtggggccccagcggctgcaggtgctgaatgcctcccacgaggactccggggcctacagctgccggcagcggctcacgcagcgcgtactgtgccacttcagtgtgcgggtgacagacgctccatcctcgggagatgacgaagacggggaggacgaggctgaggacacaggtgtggacacaggggccccttactggacacggcccgagcggatggacaagaagctgctggccgtgccggccgccaacaccgtccgcttccgctgcccagccgctggcaaccccactccctccatctcctggctgaagaacggcagggagttccgcggcgagcaccgcattggaggcatcaagctgcggcatcagcagtggagcctggtcatggaaagcgtggtgccctcggaccgcggcaactacacctgcgtcgtggagaacaagtttggcagcatccggcagacgtacacgctggacgtgctggagcgctccccgcaccggcccatcctgcaggcggggctgccggccaaccagacggcggtgctgggcagcgacgtggagttccactgcaaggtgtacagtgacgcacagccccacatccagtggctcaagcacgtggaggtgaatggcagcaaggtgggcccggacggcacaccctacgttaccgtgctcaagacggcgggcgctaacaccaccgacaaggagctagaggttctctccttgcacaacgtcacctttgaggacgccggggagtacacctgcctggcgggcaattctattgggttttctcatcactctgcgtggctggtggtgctgccagccgaggaggagctggtggaggctgacgaggcgggcagtgtgtatgcaggcatcctcagctacggggtgggcttcttcctgttcatcctggtggtggcggctgtgacgctctgccgcctgcgcagcccccccaagaaaggcctgggctcccccaccgtgcacaagatctcccgcttcccgctcaagcgacaggtgtccctggagtccaacgcgtccatgagctccaacacaccactggtgcgcatcgcaaggctgtcctcaggggagggccccacgctggccaatgtctccgagctcgagctgcctgccgaccccaaatgggagctgtctcgggcccggctgaccctgggcaagccccttggggagggctgcttcggccaggtggtcatggcggaggccatcggcattgacaaggaccgggccgccaagcctgtcaccgtagccgtgaagatgctgaaagacgatgccactgacaaggacctgtcggacctggtgtctgagatggagatgatgaagatgatcgggaaacacaaaaacatcatcaacctgctgggcgcctgcacgcagggcgggcccctgtacgtgctggtggagtacgcggccaagggtaacctgcgggagtttctgcgggcgcggcggcccccgggcctggactactccttcgacacctgcaagccgcccgaggagcagctcaccttcaaggacctggtgtcctgtgcctaccaggtggcccggggcatggagtacttggcctcccagaagtgcatccacagggacctggctgcccgcaatgtgctggtgaccgaggacaacgtgatgaagatcgcagacttcgggctggcccgggacgtgcacaacctcgactactacaagaagacaaccaacggccggctgcccgtgaagtggatggcgcctgaggccttgtttgaccgagtctacactcaccagagtgacgtctggtcctttggggtcctgctctgggagatcttcacgctggggggctccccgtaccccggcatccctgtggaggagctcttcaagctgctgaaggagggccaccgcatggacaagcccgccaactgcacacacgacctgtacatgatcatgcgggagtgctggcatgccgcgccctcccagaggcccaccttcaagcagctggtggaggacctggaccgtgtccttaccgtgacgtccaccgacgagtacctggacctgtcggcgcctttcgagcagtactccccgggtggccaggacacccccagctccagctcctcaggggacgactccgtgtttgcccacgacctgctgcccccggccccacccagcagtgggggctcgcggacgtgaagggccactggtccccaacaatgtgaggggtccctagcagcccaccctgctgctggtgcacagccactccccggcatgagactcagtgcagatggagagacagctacacagagctttggtctgtgtgtgtgtgtgtgcgtgtgtgtgtgtgtgtgcacatccgcgtgtgcctgtgtgcgtgcgcatcttgcctccaggtgcagaggtaccctgggtgtccccgctgctgtgcaacggtctcctgactggtgctgcagcaccgaggggcctttgttctggggggacccagtgcagaatgtaagtgggcccacccggtgggacccccgtggggcagggagctgggcccgacatggctccggcctctgcctttgcaccacgggacatcacagggtgggcctcggcccctcccacacccaaagctgagcctgcagggaagccccacatgtccagcaccttgtgcctggggtgttagtggcaccgcctccccacctccaggctttcccacttcccaccctgcccctcagagactgaaattacgggtacctgaagatgggagcctttaccttttatgcaaaaggtttattccggaaactagtgtacatttctataaatagatgctgtgtatatggtatatatacatatatatatataacatatatggaagaggaaaaggctggtacaacggaggcctgcgaccctgggggcacaggaggcaggcatggccctgggcggggcgtgggggggcgtggagggaggccccagggggtctcacccatgcaagcagaggaccagggctttttctggcaccgcagttttgttttaaaactggacctgtatatttgtaaagctatttatgggcccctggcactcttgttcccacaccccaacacttccagcatttagctggccacatggcggagagttttaatttttaacttattgacaaccgagaaggtttatcccgccgatagagggacggccaagaatgtacgtccagcctgccccggagctggaggatcccctccaagcctaaaaggttgttaatagttggaggtgattccagtgaagatattttatttcctttgtcctttttcaggagaattagatttctataggatttttctttaggagatttattttttggacttcaaagcaagctggtattttcatacaaattcttctaattgctgtgtgtcccaggcagggagacggtttccagggaggggccggccctgtgtgcaggttccgatgttattagatgttacaagtttatatatatctatatatataatttattgagtttttacaagatgtatttgttgtagacttaacacttcttacgcaatgcttctagagttttatagcctggactgctacctttcaaagcttggagggaagccgtgaattcagttggttcgttctgtactgttactgggccctgagtctgggcagctgtcccttgcttgcctgcagggccatggctcagggtggtctcttcttggggcccagtgcatggtggccagaggtgtcacccaaaccggcaggtgcgattttgttaacccagcgacgaactttccgaaaaataaagacacctggttgctaacctg

SEQ ID NO: 193 - protein, 798 aa, Homo sapiens
MGAPACALCVAVAIVAGASSESLGTEQRVVGRAAEVPGPEPGQQEQLVFGSGDAVELSCPPPGGGPMGPTVWVKDGTGLVPSVLVGPQRLQVLNASHEDSGAYSCRQRLTQRVLCHFSVRVTDAPSSGDDEDGEDEAEDTGVDTGAPYWWERMDKKLLAVPAANTVRFRCPAAGNPTPSISWLKNGREFRGEHRIGGIKLRHQQWSLVMESVVPSDRGNYTCVVENKFGSIRQTYTLDVLERSPHRPILQAGLPANQTAVLGSDVEFHCKVYSDAQPHIQWLKHVEVNGSKVGPDGTPYVTVLKTAGANTTDKELEVLSLHNVTFEDAGEYTCLAGNSIGFSHHSAWLVVLPAEEELVEADEAGSVYAGILSYGVGFFLFILVVAAVTLCRLRSPPKKGLGSPTVHKISRFPLKRQVSLESNASMSSNTPLVRIARLSSGEGPTLANVSELELPADPKWELSRARLTLGKPLGEGCFGQVVMAEAIGIDKDRAAKPVTVAVKMLKDDATDKDLSDLVSEMEMMKMIGKHKNIINLLGACTQGGPLYVLVEYAAKGNLREFLRARRPPGLDYSFDTCKPPEEQLTFKDLVSCAYQVRMEYLASQKCIHRDLAARNVLVTEDNVMKIADFGLARDVHNLDYYKKTTNGRLPVKWMAPEALFDRVYTHQSDVWSFGVLLWEIFTLGGSPYPGIPVEELFKLLKEGHRMDKPANCTHDLYMIMRECWHAAPSQRPTFKQLVEDLDRVLTVTSTDEYLDLSAPFEQYSPGGQDTPSSSSSGDDSVFAHDLLPPAPPSSGGSRT

SEQ ID NO: 194 - DNA, 3727 bp, Homo sapiens
gtcgcgggcagctggcgccgcgcggtcctgctctgccggtcgcacggacgcaccggcgggccgccggccggtgcccgcgccgggccgtggggggcagcatgcccgcgcgccgctgcctgaggacgccgcggcccccgcccccgccatgggcgcccctgcctgcgccctcgcgctctgcgtggccgtggccatcgtggccggcgcctcctcggagtccttggggacggagcagcgcgtcgtggggcgagcggcagaagtcccgggcccagagcccggccagcaggagcagttggtcttcggcagcggggatgctgtggagctgagctgtcccccgcccgggggtggtcccatggggcccactgtctgggtcaaggatggcacagggctggtgccctcggagcgtgtcctggtggggccccagcggctgcaggtgctgaatgcctcccacgaggactccggggcctacagctgccggcagcggctcacgcagcgcgtactgtgccacttcagtgtgcgggtgacagacgctccatcctcgggagatgacgaagacggggaggacgaggctgaggacacaggtgtggacacaggggccccttactggacacggcccgagcggatggacaagaagctgctggccgtgccggccgccaacaccgtccgcttccgctgcccagccgctggcaaccccactccctccatctcctggctgaagaacggcagggagttccgcggcgagcaccgcattggaggcatcaagctgcggcatcagcagtggagcctggtcatggaaagcgtggtgccctcggaccgcggcaactacacctgcgtcgtggagaacaagtttggcagcatccggcagacgtacacgctggacgtgctggagcgctccccgcaccggcccatcctgcaggcggggctgccggccaaccagacggcggtgctgggcagcgacgtggagttccactgcaaggtgtacagtgacgcacagccccacatccagtggctcaagcacgtggaggtgaatggcagcaaggtgggcccggacggcacaccctacgttaccgtgctcaagacggcgggcgctaacaccaccgacaaggagctagaggttctctccttgcacaacgtcacctttgaggacgccggggagtacacctgcctggcgggcaattctattgggttttctcatcactctgcgtggctggtggtgctgccagccgaggaggagctggtggaggctgacgaggcgggcagtgtgtatgcaggcatcctcagctacggggtgggcttcttcctgttcatcctggtggtggcggctgtgacgctctgccgcctgcgcagcccccccaagaaaggcctgggctcccccaccgtgcacaagatctcccgcttcccgctcaagcgacaggtgtccctggagtccaacgcgtccatgagctccaacacaccactggtgcgcatcgcaaggctgtcctcaggggagggccccacgctggccaatgtctccgagctcgagctgcctgccgaccccaaatgggagctgtctcgggcccggctgaccctgggcaagccccttggggagggctgcttcggccaggtggtcatggcggaggccatcggcattgacaaggaccgggccgccaagcctgtcaccgtagccgtgaagatgctgaaagacgatgccactgacaaggacctgtcggacctggtgtctgagatggagatgatgaagatgatcgggaaacacaaaaacatcatcaacctgctgggcgcctgcacgcagggcgggcccctgtacgtgctggtggagtacgcggccaagggtaacctgcgggagtttctgcgggcgcggcggcccccgggcctggactactccttcgacacctgcaagccgcccgaggagcagctcaccttcaaggacctggtgtcctgtgcctaccaggtggcccggggcatggagtacttggcctcccagaagtgcatccacagggacctggctgcccgcaatgtgctggtgaccgaggacaacgtgatgaagatcgcagacttcgggctggcccgggacgtgcacaacctcgactactacaagaagacaaccaacggccggctgcccgtgaagtggatggcgcctgaggccttgtttgaccgagtctacactcaccagagtgacgtctggtcctttggggtcctgctctgggagatcttcacgctggggggctccccgtaccccggcatccctgtggaggagctcttcaagctgctgaaggagggccaccgcatggacaagcccgccaactgcacacacgacctgtacatgatcatgcgggagtgctggcatgccgcgccctcccagaggcccaccttcaagcagctggtggaggacctggaccgtgtccttaccgtgacgtccaccgacgagtacctggacctgtcggcgcctttcgagcagtactccccgggtggccaggacacccccagctccagctcctcaggggacgactccgtgtttgcccacgacctgctgcccccggccccacccagcagtgggggctcgcggacgtgaagggccactggtccccaacaatgtgaggggtccctagcagcccaccctgctgctggtgcacagccactccccggcatgagactcagtgcagatggagagacagctacacagagctttggtctgtgtgtgtgtgtgtgcgtgtgtgtgtgtgtgtgcacatccgcgtgtgcctgtgtgcgtgcgcatcttgcctccaggtgcagaggtaccctgggtgtccccgctgctgtgcaacggtctcctgactggtgctgcagcaccgaggggcctcggcccctcccacacccaaagctgagcctgcagggaagccccacatgtccagcaccttgtgcctggggtgttagtggcaccgcctccccacctccaggctttcccacttcccaccctgcccctcagagactgaaattacgggtacctgaagatgggagcctttaccttttatgcaaaaggtttattccggaaactagtgtacatttctataaatagatgctgtgtatatggtatatatacatatatatatataacatatatggaagaggaaaaggctggtacaacggaggcctgcgaccctgggggcacaggaggcaggcatggccctgggcggggcgtgggggggcgtggagggaggccccagggggtctcacccatgcaagcagaggaccagggctttttctggcaccgcagttttgttttaaaactggacctgtatatttgtaaagctatttatgggcccctggcactcttgttcccacaccccaacacttccagcatttagctggccacatggcggagagttttaatttttaacttattgacaaccgagaaggtttatcccgccgatagagggacggccaagaatgtacgtccagcctgccccggagctggaggatcccctccaagcctaaaaggttgttaatagttggaggtgattccagtgaagatattttatttcctttgtcctttttcaggagaattagatttctataggatttttctttaggagatttattttttggacttcaaagcaagctggtattttcatacaaattcttctaattgctgtgtgtcccaggcagggagacggtttccagggaggggccggccctgtgtgcaggttccgatgttattagatgttacaagtttatatatatctatatatat

SEQ ID NO: 195 - protein, 798 aa, Homo sapiens; identical to SEQ ID NO: 193

SEQ ID NO: 196 - DNA, 1021 bp, Homo sapiens
gtcgcgggcagctggcgccgcgcggtcctgctctgccggtcgcacggacgcaccggcgggccgccggccggtgcccgcgccgggccgtggggggcagcatgcccgcgcgccgctgcctgaggacgccgcggcccccgcccccgccatgggcgcccctgcctgcgccctcgcgctctgcgtggccgtggccatcgtggccggcgcctcctcggagtccttggggacggagcagcgcgtcgtggggcgagcggcagaagtcccgggcccagagcccggccagcaggagcagttggtcttcggcagcggggatgctgtggagctgagctgtcccccgcccgggggtggtcccatggggcccactgtctgggtcaaggatggcacagggctggtgccctcggagcgtgtcctggtggggccccagcggctgcaggtgctgaatgcctcccacgaggactccggggcctacagctgccggcagcggctcacgcagcgcgtactgtgccacttcagtgtgcgggtgacagacgctccatcctcgggagatgacgaagacggggaggacgaggctgaggacacaggtgtggacacaggggccccttactggacacggcccgagcggatggacaagaagctgctggccgtgccggccgccaacaccgtccgcttccgctgcccagccgctggcaaccccactccctccatctcctggctgaagaacggcagggagttccgcggcgagcaccgcattggaggcatcaagctgcggcatcagcagtggagcctggtcatggaaagcgtggtgccctcggaccgcggcaactacacctgcgtcgtggagaacaagtttggcagcatccggcagacgtacacgctggacgtgctggagcgctccccgcaccggcccatcctgcaggcggggctgccggccaaccagacggcggtgctgggcagcgacgtggagttccactgcaagacggcgggcgctaacaccaccgacaaggagctagaggttctctccttg

SEQ ID NO: 197 - protein, 286 aa, Homo sapiens
MGAPACALCVAVAIVAGASSESLGTEQRVVGRAAEVPGPEPGQQEQLVFGSGDAVELSCPPPGGGPMGPTVWVKDGTGLVPSVLVGPQRLQVLNASHEDSGAYSCRQRLTQRVLCHFSVRVTDAPSSGDDEDGEDEAEDTGVDTGAPYWWERMDKKLLAVPAANTVRFRCPAAGNPTPSISWLKNGREFRGEHRIGGIKLRHQQWSLVMESVVPSDRGNYTCVVENKFGSIRQTYTLDVLERSPHRPILQAGLPANQTAVLGSDVEFHCKTAGANTTDKELEVLSL

SEQ ID NO: 198 - DNA, 3733 bp, Homo sapiens
gtcgcgggcagctggcgccgcgcggtcctgctctgccggtcgcacggacgcaccggcgggccgccggccggtgcccgcgccgggccgtggggggcagcatgcccgcgcgccgctgcctgaggacgccgcggcccccgcccccgccatgggcgcccctgcctgcgccctcgcgctctgcgtggccgtggccatcgtggccggcgcctcctcggagtccttggggacggagcagcgcgtcgtggggcgagcggcagaagtcccgggcccagagcccggccagcaggagcagttggtcttcggcagcggggatgctgtggagctgagctgtcccccgcccgggggtggtcccatggggcccactgtctgggtcaaggatggcacagggctggtgccctcggagcgtgtcctggtggggccccagcggctgcaggtgctgaatgcctcccacgaggactccggggcctacagctgccggcagcggctcacgcagcgcgtactgtgccacttcagtgtgcgggtgacagacgctccatcctcgggagatgacgaagacggggaggacgaggctgaggacacaggtgtggacacaggggccccttactggacacggcccgagcggatggacaagaagctgctggccgtgccggccgccaacaccgtccgcttccgctgcccagccgctggcaaccccactccctccatctcctggctgaagaacggcagggagttccgcggcgagcaccgcattggaggcatcaagctgcggcatcagcagtggagcctggtcatggaaagcgtggtgccctcggaccgcggcaactacacctgcgtcgtggagaacaagtttggcagcatccggcagacgtacacgctggacgtgctggagcgctccccgcaccggcccatcctgcaggcggggctgccggccaaccagacggcggtgctgggcagcgacgtggagttccactgcaaggtgtacagtgacgcacagccccacatccagtggctcaagcacgtggaggtgaatggcagcaaggtgggcccggacggcacaccctacgttaccgtgctcaagtcctggatcagtgagagtgtggaggccgacgtgcgcctccgcctggccaatgtgtcggagcgggacgggggcgagtacctctgtcgagccaccaatttcataggcgtggccgagaaggccttttggctgagcgttcacgggccccgagcagccgaggaggagctggtggaggctgacgaggcgggcagtgtgtatgcaggcatcctcagctacggggtgggcttcttcctgttcatcctggtggtggcggctgtgacgctctgccgcctgcgcagcccccccaagaaaggcctgggctcccccaccgtgcacaagatctcccgcttcccgctcaagcgacaggtgtccctggagtccaacgcgtccatgagctccaacacaccactggtgcgcatcgcaaggctgtcctcaggggagggccccacgctggccaatgtctccgagctcgagctgcctgccgaccccaaatgggagctgtctcgggcccggctgaccctgggcaagccccttggggagggctgcttcggccaggtggtcatggcggaggccatcggcattgacaaggaccgggccgccaagcctgtcaccgtagccgtgaagatgctgaaagacgatgccactgacaaggacctgtcggacctggtgtctgagatggagatgatgaagatgatcgggaaacacaaaaacatcatcaacctgctgggcgcctgcacgcagggcgggcccctgtacgtgctggtggagtacgcggccaagggtaacctgcgggagtttctgcgggcgcggcggcccccgggcctggactactccttcgacacctgcaagccgcccgaggagcagctcaccttcaaggacctggtgtcctgtgcctaccaggtggcccggggcatggagtacttggcctcccagaagtgcatccacagggacctggctgcccgcaatgtgctggtgaccgaggacaacgtgatgaagatcgcagacttcgggctggcccgggacgtgcacaacctcgactactacaagaagacaaccaacggccggctgcccgtgaagtggatggcgcctgaggccttgtttgaccgagtctacactcaccagagtgacgtctggtcctttggggtcctgctctgggagatcttcacgctggggggctccccgtaccccggcatccctgtggaggagctcttcaagctgctgaaggagggccaccgcatggacaagcccgccaactgcacacacgacctgtacatgatcatgcgggagtgctggcatgccgcgccctcccagaggcccaccttcaagcagctggtggaggacctggaccgtgtccttaccgtgacgtccaccgacgagtacctggacctgtcggcgcctttcgagcagtactccccgggtggccaggacacccccagctccagctcctcaggggacgactccgtgtttgcccacgacctgctgcccccggccccacccagcagtgggggctcgcggacgtgaagggccactggtccccaacaatgtgaggggtccctagcagcccaccctgctgctggtgcacagccactccccggcatgagactcagtgcagatggagagacagctacacagagctttggtctgtgtgtgtgtgtgtgcgtgtgtgtgtgtgtgtgcacatccgcgtgtgcctgtgtgcgtgcgcatcttgcctccaggtgcagaggtaccctgggtgtccccgctgctgtgcaacggtctcctgactggtgctgcagcaccgaggggcctcggcccctcccacacccaaagctgagcctgcagggaagccccacatgtccagcaccttgtgcctggggtgttagtggcaccgcctccccacctccaggctttcccacttcccaccctgcccctcagagactgaaattacgggtacctgaagatgggagcctttaccttttatgcaaaaggtttattccggaaactagtgtacatttctataaatagatgctgtgtatatggtatatatacatatatatatataacatatatggaagaggaaaaggctggtacaacggaggcctgcgaccctgggggcacaggaggcaggcatggccctgggcggggcgtgggggggcgtggagggaggccccagggggtctcacccatgcaagcagaggaccagggctttttctggcaccgcagttttgttttaaaactggacctgtatatttgtaaagctatttatgggcccctggcactcttgttcccacaccccaacacttccagcatttagctggccacatggcggagagttttaatttttaacttattgacaaccgagaaggtttatcccgccgatagagggacggccaagaatgtacgtccagcctgccccggagctggaggatcccctccaagcctaaaaggttgttaatagttggaggtgattccagtgaagatattttatttcctttgtcctttttcaggagaattagatttctataggatttttctttaggagatttattttttggacttcaaagcaagctggtattttcatacaaattcttctaattgctgtgtgtcccaggcagggagacggtttccagggaggggccggccctgtgtgcaggttccgatgttattagatgttacaagtttatatatatctatatatat

SEQ ID NO: 199 - protein, 798 aa, Homo sapiens
MGAPACALCVAVAIVAGASSESLGTEQRVVGRAAEVPGPEPGQQEQLVFGSGDAVELSCPPPGGGPMGPTVWVKDGTGLVPSVLVGPQRLQVLNASHEDSGAYSCRQRLTQRVLCHFSVRVTDAPSSGDDEDGEDEAEDTGVDTGAPYWWERMDKKLLAVPAANTVRFRCPAAGNPTPSISWLKNGREFRGEHRIGGIKLRHQQWSLVMESVVPSDRGNYTCVVENKFGSIRQTYTLDVLERSPHRPILQAGLPANQTAVLGSDVEFHCKVYSDAQPHIQWLKHVEVNGSKVGPDGTPYVTVLKSWISESVEADVRLRLANVSDGGEYLCRATNFIGVAEKAFWLSVHGPRAAEEELVEADEAGSVYAGILSYGVGFFLFILVVAAVTLCRLRSPPKKGLGSPTVHKISRFPLKRQVSLESNASMSSNTPLVRIARLSSGEGPTLANVSELELPADPKWELSRARLTLGKPLGEGCFGQVVMAEAIGIDKDRAAKPVTVAVKMLKDDATDKDLSDLVSEMEMMKMIGKHKNIINLLGACTQGGPLYVLVEYAAKGNLREFLRARRPPGLDYSFDTCKPPEEQLTFKDLVSCAYQVRMEYLASQKCIHRDLAARNVLVTEDNVMKIADFGLARDVHNLDYYKKTTNGRLPVKWMAPEALFDRVYTHQSDVWSFGVLLWEIFTLGGSPYPGIPVEELFKLLKEGHRMDKPANCTHDLYMIMRECWHAAPSQRPTFKQLVEDLDRVLTVTSTDEYLDLSAPFEQYSPGGQDTPSSSSSGDDSVFAHDLLPPAPPSSGGSRT

SEQ ID NO: 200 - DNA, 3837 bp, Homo sapiens
gtcgcgggcagctggcgccgcgcggtcctgctctgccggtcgcacggacgcaccggcgggccgccggccggtgcccgcgccgggccgtggggggcagcatgcccgcgcgccgctgcctgaggacgccgcggcccccgcccccgccatgggcgcccctgcctgcgccctcgcgctctgcgtggccgtggccatcgtggccggcgcctcctcggagtccttggggacggagcagcgcgtcgtggggcgagcggcagaagtcccgggcccagagcccggccagcaggagcagttggtcttcggcagcggggatgctgtggagctgagctgtcccccgcccgggggtggtcccatggggcccactgtctgggtcaaggatggcacagggctggtgccctcggagcgtgtcctggtggggccccagcggctgcaggtgctgaatgcctcccacgaggactccggggcctacagctgccggcagcggctcacgcagcgcgtactgtgccacttcagtgtgcgggtgacagacgctccatcctcgggagatgacgaagacggggaggacgaggctgaggacacaggtgtggacacaggggccccttactggacacggcccgagcggatggacaagaagctgctggccgtgccggccgccaacaccgtccgcttccgctgcccagccgctggcaaccccactccctccatctcctggctgaagaacggcagggagttccgcggcgagcaccgcattggaggcatcaagctgcggcatcagcagtggagcctggtcatggaaagcgtggtgccctcggaccgcggcaactacacctgcgtcgtggagaacaagtttggcagcatccggcagacgtacacgctggacgtgctggagcgctccccgcaccggcccatcctgcaggcggggctgccggccaaccagacggcggtgctgggcagcgacgtggagttccactgcaaggtgtacagtgacgcacagccccacatccagtggctcaagcacgtggaggtgaatggcagcaaggtgggcccggacggcacaccctacgttaccgtgctcaaggtgtccctggagtccaacgcgtccatgagctccaacacaccactggtgcgcatcgcaaggctgtcctcaggggagggccccacgctggccaatgtctccgagctcgagctgcctgccgaccccaaatgggagctgtctcgggcccggctgaccctgggcaagccccttggggagggctgcttcggccaggtggtcatggcggaggccatcggcattgacaaggaccgggccgccaagcctgtcaccgtagccgtgaagatgctgaaagacgatgccactgacaaggacctgtcggacctggtgtctgagatggagatgatgaagatgatcgggaaacacaaaaacatcatcaacctgctgggcgcctgcacgcagggcgggcccctgtacgtgctggtggagtacgcggccaagggtaacctgcgggagtttctgcgggcgcggcggcccccgggcctggactactccttcgacacctgcaagccgcccgaggagcagctcaccttcaaggacctggtgtcctgtgcctaccaggtggcccggggcatggagtacttggcctcccagaagtgcatccacagggacctggctgcccgcaatgtgctggtgaccgaggacaacgtgatgaagatcgcagacttcgggctggcccgggacgtgcacaacctcgactactacaagaagacaaccaacggccggctgcccgtgaagtggatggcgcctgaggccttgtttgaccgagtctacactcaccagagtgacgtctggtcctttggggtcctgctctgggagatcttcacgctggggggctccccgtaccccggcatccctgtggaggagctcttcaagctgctgaaggagggccaccgcatggacaagcccgccaactgcacacacgacctgtacatgatcatgcgggagtgctggcatgccgcgccctcccagaggcccaccttcaagcagctggtggaggacctggaccgtgtccttaccgtgacgtccaccgacgagtacctggacctgtcggcgcctttcgagcagtactccccgggtggccaggacacccccagctccagctcctcaggggacgactccgtgtttgcccacgacctgctgcccccggccccacccagcagtgggggctcgcggacgtgaagggccactggtccccaacaatgtgaggggtccctagcagcccaccctgctgctggtgcacagccactccccggcatgagactcagtgcagatggagagacagctacacagagctttggtctgtgtgtgtgtgtgtgcgtgtgtgtgtgtgtgtgcacatccgcgtgtgcctgtgtgcgtgcgcatcttgcctccaggtgcagaggtaccctgggtgtccccgctgctgtgcaacggtctcctgactggtgctgcagcaccgaggggcctttgttctggggggacccagtgcagaatgtaagtgggcccacccggtgggacccccgtggggcagggagctgggcccgacatggctccggcctctgcctttgcaccacgggacatcacagggtgggcctcggcccctcccacacccaaagctgagcctgcagggaagccccacatgtccagcaccttgtgcctggggtgttagtggcaccgcctccccacctccaggctttcccacttcccaccctgcccctcagagactgaaattacgggtacctgaagatgggagcctttaccttttatgcaaaaggtttattccggaaactagtgtacatttctataaatagatgctgtgtatatggtatatatacatatatatatataacatatatggaagaggaaaaggctggtacaacggaggcctgcgaccctgggggcacaggaggcaggcatggccctgggcggggcgtgggggggcgtggagggaggccccagggggtctcacccatgcaagcagaggaccagggctttttctggcaccgcagttttgttttaaaactggacctgtatatttgtaaagctatttatgggcccctggcactcttgttcccacaccccaacacttccagcatttagctggccacatggcggagagttttaatttttaacttattgacaaccgagaaggtttatcccgccgatagagggacggccaagaatgtacgtccagcctgccccggagctggaggatcccctccaagcctaaaaggttgttaatagttggaggtgattccagtgaagatattttatttcctttgtcctttttcaggagaattagatttctataggatttttctttaggagatttattttttggacttcaaagcaagctggtattttcatacaaattcttctaattgctgtgtgtcccaggcagggagacggtttccagggaggggccggccctgtgtgcaggttccgatgttattagatgttacaagtttatatatatctatatatataatttattgagtttttacaagatgtatttgttgtagacttaacacttcttacgcaatgcttctagagttttatagcctggactgctacctttcaaagcttggagggaagccgtgaattcagttggttcgttctgtactgttactgggccctgagtctgggcagctgtcccttgcttgcctgcagggccatggctcagggtggtctcttcttggggcccagtgcatggtggccagaggtgtcacccaaaccggcaggtgcgattttgttaacccagcgacgaactttccgaaaaataaagacacctggttgctaacctg

SEQ ID NO: 201 - protein, 686 aa, Homo sapiens; identical to SEQ ID NO: 189

SEQ ID NO: 202 - DNA, 3767 bp, Homo sapiens
gtgcccgcgccgggccgtggggggcagcatgcccgcgcgccgctgcctgaggacgccgcggcccccgcccccgccatgggcgcccctgcctgcgccctcgcgctctgcgtggccgtggccatcgtggccggcgcctcctcggagtccttggggacggagcagcgcgtcgtggggcgagcggcagaagtcccgggcccagagcccggccagcaggagcagttggtcttcggcagcggggatgctgtggagctgagctgtcccccgcccgggggtggtcccatggggcccactgtctgggtcaaggatggcacagggctggtgccctcggagcgtgtcctggtggggccccagcggctgcaggtgctgaatgcctcccacgaggactccggggcctacagctgccggcagcggctcacgcagcgcgtactgtgccacttcagtgtgcgggtgacagacgctccatcctcgggagatgacgaagacggggaggacgaggctgaggacacaggtgtggacacaggggccccttactggacacggcccgagcggatggacaagaagctgctggccgtgccggccgccaacaccgtccgcttccgctgcccagccgctggcaaccccactccctccatctcctggctgaagaacggcagggagttccgcggcgagcaccgcattggaggcatcaagctgcggcatcagcagtggagcctggtcatggaaagcgtggtgccctcggaccgcggcaactacacctgcgtcgtggagaacaagtttggcagcatccggcagacgtacacgctggacgtgctggagcgctccccgcaccggcccatcctgcaggcggggctgccggccaaccagacggcggtgctgggcagcgacgtggagttccactgcaaggtgtacagtgacgcacagccccacatccagtggctcaagcacgtggaggtgaatggcagcaaggtgggcccggacggcacaccctacgttaccgtgctcaaggtgtccctggagtccaacgcgtccatgagctccaacacaccactggtgcgcatcgcaaggctgtcctcaggggagggccccacgctggccaatgtctccgagctcgagctgcctgccgaccccaaatgggagctgtctcgggcccggctgaccctgggcaagccccttggggagggctgcttcggccaggtggtcatggcggaggccatcggcattgacaaggaccgggccgccaagcctgtcaccgtagccgtgaagatgctgaaagacgatgccactgacaaggacctgtcggacctggtgtctgagatggagatgatgaagatgatcgggaaacacaaaaacatcatcaacctgctgggcgcctgcacgcagggcgggcccctgtacgtgctggtggagtacgcggccaagggtaacctgcgggagtttctgcgggcgcggcggcccccgggcctggactactccttcgacacctgcaagccgcccgaggagcagctcaccttcaaggacctggtgtcctgtgcctaccaggtggcccggggcatggagtacttggcctcccagaagtgcatccacagggacctggctgcccgcaatgtgctggtgaccgaggacaacgtgatgaagatcgcagacttcgggctggcccgggacgtgcacaacctcgactactacaagaagacaaccaacggccggctgcccgtgaagtggatggcgcctgaggccttgtttgaccgagtctacactcaccagagtgacgtctggtcctttggggtcctgctctgggagatcttcacgctggggggctccccgtaccccggcatccctgtggaggagctcttcaagctgctgaaggagggccaccgcatggacaagcccgccaactgcacacacgacctgtacatgatcatgcgggagtgctggcatgccgcgccctcccagaggcccaccttcaagcagctggtggaggacctggaccgtgtccttaccgtgacgtccaccgacgagtacctggacctgtcggcgcctttcgagcagtactccccgggtggccaggacacccccagctccagctcctcaggggacgactccgtgtttgcccacgacctgctgcccccggccccacccagcagtgggggctcgcggacgtgaagggccactggtccccaacaatgtgaggggtccctagcagcccaccctgctgctggtgcacagccactccccggcatgagactcagtgcagatggagagacagctacacagagctttggtctgtgtgtgtgtgtgtgcgtgtgtgtgtgtgtgtgcacatccgcgtgtgcctgtgtgcgtgcgcatcttgcctccaggtgcagaggtaccctgggtgtccccgctgctgtgcaacggtctcctgactggtgctgcagcaccgaggggcctttgttctggggggacccagtgcagaatgtaagtgggcccacccggtgggacccccgtggggcagggagctgggcccgacatggctccggcctctgcctttgcaccacgggacatcacagggtgggcctcggcccctcccacacccaaagctgagcctgcagggaagccccacatgtccagcaccttgtgcctggggtgttagtggcaccgcctccccacctccaggctttcccacttcccaccctgcccctcagagactgaaattacgggtacctgaagatgggagcctttaccttttatgcaaaaggtttattccggaaactagtgtacatttctataaatagatgctgtgtatatggtatatatacatatatatatataacatatatggaagaggaaaaggctggtacaacggaggcctgcgaccctgggggcacaggaggcaggcatggccctgggcggggcgtgggggggcgtggagggaggccccagggggtctcacccatgcaagcagaggaccagggctttttctggcaccgcagttttgttttaaaactggacctgtatatttgtaaagctatttatgggcccctggcactcttgttcccacaccccaacacttccagcatttagctggccacatggcggagagttttaatttttaacttattgacaaccgagaaggtttatcccgccgatagagggacggccaagaatgtacgtccagcctgccccggagctggaggatcccctccaagcctaaaaggttgttaatagttggaggtgattccagtgaagatattttatttcctttgtcctttttcaggagaattagatttctataggatttttctttaggagatttattttttggacttcaaagcaagctggtattttcatacaaattcttctaattgctgtgtgtcccaggcagggagacggtttccagggaggggccggccctgtgtgcaggttccgatgttattagatgttacaagtttatatatatctatatatataatttattgagtttttacaagatgtatttgttgtagacttaacacttcttacgcaatgcttctagagttttatagcctggactgctacctttcaaagcttggagggaagccgtgaattcagttggttcgttctgtactgttactgggccctgagtctgggcagctgtcccttgcttgcctgcagggccatggctcagggtggtctcttcttggggcccagtgcatggtggccagaggtgtcacccaaaccggcaggtgcgattttgttaacccagcgacgaactttccgaaaaataaagacacctggttgctaacctg

SEQ ID NO: 203 - protein, 686 aa, Homo sapiens; identical to SEQ ID NO: 189

SEQ ID NO: 204 - DNA, 4103 bp, Homo sapiens
gtgcccgcgccgggccgtggggggcagcatgcccgcgcgccgctgcctgaggacgccgcggcccccgcccccgccatgggcgcccctgcctgcgccctcgcgctctgcgtggccgtggccatcgtggccggcgcctcctcggagtccttggggacggagcagcgcgtcgtggggcgagcggcagaagtcccgggcccagagcccggccagcaggagcagttggtcttcggcagcggggatgctgtggagctgagctgtcccccgcccgggggtggtcccatggggcccactgtctgggtcaaggatggcacagggctggtgccctcggagcgtgtcctggtggggccccagcggctgcaggtgctgaatgcctcccacgaggactccggggcctacagctgccggcagcggctcacgcagcgcgtactgtgccacttcagtgtgcgggtgacagacgctccatcctcgggagatgacgaagacggggaggacgaggctgaggacacaggtgtggacacaggggccccttactggacacggcccgagcggatggacaagaagctgctggccgtgccggccgccaacaccgtccgcttccgctgcccagccgctggcaaccccactccctccatctcctggctgaagaacggcagggagttccgcggcgagcaccgcattggaggcatcaagctgcggcatcagcagtggagcctggtcatggaaagcgtggtgccctcggaccgcggcaactacacctgcgtcgtggagaacaagtttggcagcatccggcagacgtacacgctggacgtgctggagcgctccccgcaccggcccatcctgcaggcggggctgccggccaaccagacggcggtgctgggcagcgacgtggagttccactgcaaggtgtacagtgacgcacagccccacatccagtggctcaagcacgtggaggtgaatggcagcaaggtgggcccggacggcacaccctacgttaccgtgctcaagacggcgggcgctaacaccaccgacaaggagctagaggttctctccttgcacaacgtcacctttgaggacgccggggagtacacctgcctggcgggcaattctattgggttttctcatcactctgcgtggctggtggtgctgccagccgaggaggagctggtggaggctgacgaggcgggcagtgtgtatgcaggcatcctcagctacggggtgggcttcttcctgttcatcctggtggtggcggctgtgacgctctgccgcctgcgcagcccccccaagaaaggcctgggctcccccaccgtgcacaagatctcccgcttcccgctcaagcgacaggtgtccctggagtccaacgcgtccatgagctccaacacaccactggtgcgcatcgcaaggctgtcctcaggggagggccccacgctggccaatgtctccgagctcgagctgcctgccgaccccaaatgggagctgtctcgggcccggctgaccctgggcaagccccttggggagggctgcttcggccaggtggtcatggcggaggccatcggcattgacaaggaccgggccgccaagcctgtcaccgtagccgtgaagatgctgaaagacgatgccactgacaaggacctgtcggacctggtgtctgagatggagatgatgaagatgatcgggaaacacaaaaacatcatcaacctgctgggcgcctgcacgcagggcgggcccctgtacgtgctggtggagtacgcggccaagggtaacctgcgggagtttctgcgggcgcggcggcccccgggcctggactactccttcgacacctgcaagccgcccgaggagcagctcaccttcaaggacctggtgtcctgtgcctaccaggtggcccggggcatggagtacttggcctcccagaagtgcatccacagggacctggctgcccgcaatgtgctggtgaccgaggacaacgtgatgaagatcgcagacttcgggctggcccgggacgtgcacaacctcgactactacaagaagacaaccaacggccggctgcccgtgaagtggatggcgcctgaggccttgtttgaccgagtctacactcaccagagtgacgtctggtcctttggggtcctgctctgggagatcttcacgctggggggctccccgtaccccggcatccctgtggaggagctcttcaagctgctgaaggagggccaccgcatggacaagcccgccaactgcacacacgacctgtacatgatcatgcgggagtgctggcatgccgcgccctcccagaggcccaccttcaagcagctggtggaggacctggaccgtgtccttaccgtgacgtccaccgacgagtacctggacctgtcggcgcctttcgagcagtactccccgggtggccaggacacccccagctccagctcctcaggggacgactccgtgtttgcccacgacctgctgcccccggccccacccagcagtgggggctcgcggacgtgaagggccactggtccccaacaatgtgaggggtccctagcagcccaccctgctgctggtgcacagccactccccggcatgagactcagtgcagatggagagacagctacacagagctttggtctgtgtgtgtgtgtgtgcgtgtgtgtgtgtgtgtgcacatccgcgtgtgcctgtgtgcgtgcgcatcttgcctccaggtgcagaggtaccctgggtgtccccgctgctgtgcaacggtctcctgactggtgctgcagcaccgaggggcctttgttctggggggacccagtgcagaatgtaagtgggcccacccggtgggacccccgtggggcagggagctgggcccgacatggctccggcctctgcctttgcaccacgggacatcacagggtgggcctcggcccctcccacacccaaagctgagcctgcagggaagccccacatgtccagcaccttgtgcctggggtgttagtggcaccgcctccccacctccaggctttcccacttcccaccctgcccctcagagactgaaattacgggtacctgaagatgggagcctttaccttttatgcaaaaggtttattccggaaactagtgtacatttctataaatagatgctgtgtatatggtatatatacatatatatatataacatatatggaagaggaaaaggctggtacaacggaggcctgcgaccctgggggcacaggaggcaggcatggccctgggcggggcgtgggggggcgtggagggaggccccagggggtctcacccatgcaagcagaggaccagggctttttctggcaccgcagttttgttttaaaactggacctgtatatttgtaaagctatttatgggcccctggcactcttgttcccacaccccaacacttccagcatttagctggccacatggcggagagttttaatttttaacttattgacaaccgagaaggtttatcccgccgatagagggacggccaagaatgtacgtccagcctgccccggagctggaggatcccctccaagcctaaaaggttgttaatagttggaggtgattccagtgaagatattttatttcctttgtcctttttcaggagaattagatttctataggatttttctttaggagatttattttttggacttcaaagcaagctggtattttcatacaaattcttctaattgctgtgtgtcccaggcagggagacggtttccagggaggggccggccctgtgtgcaggttccgatgttattagatgttacaagtttatatatatctatatatataatttattgagtttttacaagatgtatttgttgtagacttaacacttcttacgcaatgcttctagagttttatagcctggactgctacctttcaaagcttggagggaagccgtgaattcagttggttcgttctgtactgttactgggccctgagtctgggcagctgtcccttgcttgcctgcagggccatggctcagggtggtctcttcttggggcccagtgcatggtggccagaggtgtcacccaaaccggcaggtgcgattttgttaacccagcgacgaactttccgaaaaataaagacacctggttgctaacctg

SEQ ID NO: 205 - protein, 798 aa, Homo sapiens; identical to SEQ ID NO: 193

SEQ ID NO: 206 - DNA, 38630 bp, Mus musculus
  misc_feature (1)...(38630): n = A,T,C or G
caggtatcgtctgttaactatgataccaatcgtgagggcaagagaaatacctctgacattgacttaaaaacaaaacacatagccaggaagcacgactggatgcaagtaacatttcttttgcttgtttataaagtagggtatattaaatattaatttactggcattggcgtagagtaagaattagtaacgtatgagaaatcctgtttaaaatgtaaaattcagtacaatgaaggtactgctcagccctcacattgtatcacccacttctgaagttccaagctagcagtgatgacagtagccccagcttggtgtctgtcacctacaaggattgttttgacacagacatagaagcaatacagtgtaattgtctttacggcaaaagcaagaatgtccaggtgagcagttttcattatgcagctctggcatcattagagctaaatttagtattgagtgagtttcaggggcaaaaatgccacaacgccaaactcatgccaagagcaggcaaaccctgcatggaaggcttcgtctctttcctcttctggcagcacgtggaagcagtcacggcccgtgccatgctcttcagtgatgtaaaatcccattaacctcactctgcacatcagaccagcatggagggaccatattcttgctaatagttgcctcgaattaggcatcattatcatggagatataatatgtgtatcacataggaaacagccgttttgccagaaattcacaatgaagatccatcttgagttccttactcatagccttgtgccagttgaactttgccatcaaatgacaggtgttctccagtctcaccatggtgttttctcgccccttctctggtttctcagctgtccagtgtgaagccttatctgcgccacagcagggcaacatgaaatgtcttcccagtgcttctggacctttccaaaatgggtccagttgtgagttctcctgcgaagaaggatttgaactgaagggatcaagaagacttcagtgtggtccaagaggggaatgggatagcaagaagcccacgtgttcaggtacatgctttttaaaaactatttctctctcattctctctctctctctctctctctctctctctctctctctctctctctctctctctctatctatctctctgtctctctcattctgtctctctctgtctctctgtgtgtgtactccaagacccatatgtggaagtcagaggacaacttgtcagagtcgattttcatgtgggtcccataatatgggtctcaagaatgaaattcaagttgctaagattggtagcaaatgcctttaccccctgacccatctctctggcccctgcagacatactttagattttactgtaagatagaagctattgaacatctttgtggcttggctaccctgtgacacctgctatagcccaatgcttatatcttggaatggcttctctcttctagctgtgaaatgtgatgatgtccctcggccccagaatggcgtcatggagtgtgctcatgctactactggagaattcacctacaagtcctcatgtgcctttcaatgcaatgagggctttagcttgcatggctcagctcaacttgagtgcacatctcagggaaagtggacccaggaagtcccctcctgccaaggtaacactgagttcagactctcatgacacacatcaactccgtggttttgtggtatgggtttcttgacttccgctatgggcatgtcctttgcagtggtacaatgtccaagccttgacgtcccgggaaagatgaacatgagctgcagcggaacagcagttttcggcacagtgtgtgagtttacatgtcctgatgattggacactcaatggatctgcagttctgacgtgtggtgccacgggacgctggtctgggatgccgcctacctgtgaaggtaaggcactgatggatggtggttgccttggggagtagagggaagaggggtgttatgttgctaaggaagctaactgtccattatgtccaaatcagaatggtaggtcatagagatggataaaaagacaacaggaaatgatgtctgtggaccaggtagaatgttctgttcttctctgacacccccctttcttctccaacgctcaccactgacccccgctgttatgatttattccttggtccttctctgttctccctttctctcccgttatacctcccgtttctgctccctcgaagtgggattctgatcattggaaaggggagatctagagacaaaaggaggagcaggaaataagtgtgtgtgagagaaggcaggggtagttcagtgctaaccgaggtatggtgacgtagtgccaaagagctttacaaggctacgtcctaactgggagcacgatatgcagcctcaacggcggtttgagaggagttgattaaatcttcaatgacagtaataaatcttctgctgatagtaataaatatacagagaaaaggccaaacggcaaggccgaaagactcgaaagccaagtgttgcttatactgtctcctcccaatttgtttcctcagccccagtcagccccacccgtcccttggtagttgcactttctgcggcaggaacctcactcctgacatcgtcctcattgctctacttgttgatgagatactttcggaagaaaggtaaattcaggcatccactccaaaaatgaatttgaaaattgtgtgtgtgtgtgtgtgtgtgtgtgtgtgtgtgtatttcccctcactgatgagctgtggccacttaaaatttttcactagaatctatagaggagaacctacttattaaataaccccccagtaaatagcaatggaatcaagcaaaagtttcaggacatattactcagcttgatgttgaaagttttaggaaatccatgttgactgtgataacatgcttatctctagggggcgctactcacataaaattccatggtgtccttggagatggtcaatcagaattgtagagttataccacgattctattgggagcataggtgaaatgctttcaagtaactgagaacattgcttgaaatagtctaaatttgtgtgtgtgtgtgtataaataacaaggataatatatcaggaatacacacacacacacacacacacacacagaggaatagaaataggaaacatacccacagtccctttgatctacagactatttaaatgtttttaattaaaaattgaaatttagacattaggaaattccatgtaaaacatggattttggatttcttaggagaacttagaagaatcagacaagatgagcatgcagctgtttcctggtgtcagaaagccgctgtggtctttgcatatttcgtcctctgcattttgccttaattgctaccaaatgcttattacagagtcctgtaatactgagcatgtaaggccagatgagtcaggtcaattaatctgatttgcttaaaactcattagtccgaactaatagttttctttctcttgcagcaaagaaatttgttcctgctaggtaaggtgaattcttgtgtaaagcatgctatttaatacatacattttcccctctgcatgtaggaaagcagtgattcacgtcctttccttgtgtttccacagcagctgccaaagccttcaatcgtttgaaaactaccatgtgccttcttacaacgtctaggttcaaaacaatcaggtatgacttgggcaggtcatgtgaatgagagaaaaatctctcttacacatagtgctcctccttgacaccctcaatcaagcctgccattggcttgagagaatccccatcttgatgataatttatagaaacttgtttctttctctccctctccctcccgccttctccctctccctccctccttctccttctgtctccctccctccttctccttctccccctcccttctctctctctctctctctctctctctctctctctctctctctctctctctctctctctctttcgctctccccccccctctgtaagtgaagcagcagacgttggtcttccttggatcattttacttagggatggtggtggtggtggtggtggtaagtctagacccatttagcaattagatttgtaagcatgaatctaagctagggactgggagagaccaggcctcttcctttattcctctgagataaagaactggggcacagactttataggaacttgcctgagtttccaaagctaccgtgaacaccagcagtagcaggatctggaatctgtgatcctcagtgtccccattgcttctgagagtttgcttgggaggtcaagtccttctaaataaagggttttcttgatgaagagaattgctggtgtagtgtggggcttagagaaggattgaacagaaactagatgtttcaatttgcctcttcggctcccttccttgagtttcttcattagcatagtccttggtgatgaccaatatagttgaacagtacttagttaaagcccaaggtgcaccagagttcattctttgggttgtatattccgtagggttcaatgggtataactgacctatatctacgattacagtgtcatagagactagtaactgagtggcattgggagttcatgtctggagcacctccgagacagctgctagctgatgggtgtgctttgttgctgcttccagcatgcaggagacttggaagactctcacacttgcttgtatttgcaggaacacaaatgcatcgtgggaaatagaatgataagctgaagacagcaggaaatgaactgtctacagaatcctggttcctcttgcctgcttaaaaactgggatcccgactccatggatcaaaactgagtgacaaggccagccctctactagaatgactcagtttcctctttcctagttagtgacagtatgaagaacatgctgccacagaaggtggaggtgctctcttcaaaagagagtgaatggacgggggagagcgcgagctggaatagcagaatccattctgactcttagtcatgctagaatttgggaacagaaacagcgttttattgctttgtttctttctcttgttccccacacagtgtgtcaacagctaattccagtattgttgtcacaggcgtaaataatatttatcagcagttttgagcaaatgattttctatttctatcttgaaaaacaaaaaaggcagaattgccatattctcaggttatggcctaggagtgtcattacgggtacaaggtgcagttcctggtgaatataacatgttaagactgctaggcagacatattggctttatccccatgggattcagtggctgccgaagtattcttgaacattgtgttctgtgtcctggcactgaagccagcatgagatccatcattcttatgtcagctcaagggtcaaaaggacttaaaaaaaaatcagaatcctgtggcctatcacatggcaaaagttatcctaaatcttttttttaattagaaaatccctaaatctaaaattaatgttatatctgcagcccacttattttcaaaatgagaaattaataatcagtgtgaaatcctgagtatttaacggtagctggttttaagacatggtactatcagaagaatagaaagtgaagagagagtttagatatttgatccccccctgccctgccaaggtttttttttttctggaagagagaccatccttgaagctaaatgttctgatttaataaaagcataaatgataaaaagtacattttaatgtatttaagagcatgtcaaaatgtgaacatgctgtgattcctaaaagagtggttcttttacacgacaaacacgtgattcttataccttgtatctaattctaaatccacgatgaggtgtcaccctgtaatcaatgcagacaatggacttttaaagagtaaaggtgtccagtggttattctagttcatatgttctagaggaggggaaagctggtgaacacagtgattatgttatgttacagagaataaaactcctaagcaatttcatctgcaactggcaatgacatacacttggtctgtaaatgccagctctgttcctgccaaaagtgtcccaagttccaaattaacatattagagaaagaaaatttttgggaggtcctcgctgattggtggcggtggaaaagccaacagggaacaggaagtgtgataggcattaggatgagagaggagtgacagagagagagagagagagagagagagagagagagagagagagactgtgagaaactgcacaatgtaaatggttgtatattttgtatcagaaattactgtgtgaaatataagtgtggtctgtatctaagtcctgattgagtattttaaattatgatttaaaatattttatggtgtaagagtatgtatttatttaaatatgttaaacttattgtattcacatatgagtataatgttttgcaataaacgcgtttctacttatctttgtgtatctgagtcttcttaacattttaatgcatccagattaaaatctgtaccgcataaaaattacatcctaattaattaattgtgtgcacatgtgcttgcgtgcatctgaattgtcactgtgaatgtgtggaaatcgaaggacagctttgaggggtcagctctctctttacacaccacgggcttgcgtggcaagtgccttgacccaaacctccctcttttaaaatggaatatcaggcaaccatatacctaactctgcaacatttctattggcgtaagtgaaaccctgtcagttagcggttccttcacactcttttctctcccctccatggcaatgctaatctacattatgtatatggatttgcctcttcagcacactttatatacataaaagtgcacatgaccttcttcctagctctttttacttagcacactgttttctagggttctccatggtgtagcttgtatcagctcttcatcccacttacggaaaaattatattctctgtgctgattgaccagatattgtatctggaccactcaggccattgtcactgaatgtctttccgccttttgattactgtgaatgacgctgctagggaagccctgagggtgtggttaaggtgcaactcctccactgtcattatctggaggcaggtaacttaggaatcctgctctgcttttagagaaaccttccagctctctcccagtgaggctgctccattttacagtcacacctgccatgagaagggctccagtgtctccacattctagcttatacttacagtggtctcttgatgacatcaacactctagtgggtgtggaattatatacatctaggctcttgtatccattccaaaagataaccaaacattgactatctaaaagaatcaccaagcccaaggaaacaaagtctttgctgcatgacagtctcatttgctgtaattttaaaaagttcatgttcatttagttcattgggttcactgaagtttgaattatcccatcttagttagggtttcattgctgtgaagaaacaccatgatcaaggcaacttcttcctttttttttttttttttttttggtttttcgagacagggtttctctgtgtagccctgactgtcctggaactcactttgtagaccaggctggctcgaactcagaaatccgcctgcctctgcctcccaaatgctgggattaaaggcgtgcaccaccacacccggcaaaggacaacatttaactgggtccagcttacaattttagaggttcagtccattatggaggaagcatggcaatgttcaagcagacatgatgctagagaaggatgctgggagttctacatcttgattcaaaggcatccagaaggaagggtctcttccacactgggtagagcttgagcatacgacctcaaagtctacccccacagtgacacacttcttccaacaagactacacctattccaacaaggccacccctattccaacaaggccactcctcccaatagtgctacctaccgtgggccaagcatatccaaaccaccaaatcccccaagactagattcatataatgaggttcttcgttaccagtatatacattcttgctgctattgcaaaggcctacaatgtaggcctgtgggcagacgtgatctaatttgttatcattctgagctagggcatacgtttaacagtggtctaggatgctgatattcctgattcttacgctgtgaatcctgagctgaattgcatcactaagtctcctggtccttcacttgcatacatacttcctgtttttcagaaagcccagtcattgtttcagcctcctaagttattgacggagctgttacacccatgaacttacatgacaaacaccatgacatgtatgtgccaacacacacacacacacacacacacacacacacacacacacacacaaaaatataaaatagtaataacaataacaacactacaagttagcaggtcatattaattacctttgaaagtctaaaatactacagagataggcatggttatctgaatgagttcaagccagaaagaccagtaaacattccaacaagcaagactacttagactccatagattataaagaagcaagcaagcatgtgaagttgggggatatgttggtgagtttccagggaatgacaagcagtgggagatgggggtggattaagcaccaaggaactatgaaattacttaagaacaaatacattaaaaaatgagactagtaatagttactcctctgtagcattttagactttcttttttattattattattattttgttttgttttaggtttttttttccccccgagacaaggtttctctgtatagctctggttatcctgtagaccaggctggcctcgaactcagaaatctgcctgcctctgcctcccaagtgctgggattaaaggcgtgcgccaccactgctcagcttttttttttttttggtttgtttttgttttttgtttttgtttttcgagacagagtttctctgtagccctggctgtcctggaactcactctgtagaccaggctggccttgaactcagaaatctgcctgcctctgtctcccaaatgctgggattaaaggcgtgcgccaccactgccccattttagactttcaaaggtaattaagatgacctgttaagttctagtgttgttattgttgctactacattatatttgtgtgtgtgtgtctgtgtgtatgttgacacatacatgccattttttgtcattattactaactttcttacagtttaaatactattatgtcagtgacttcctccagattgcttttgaatggctgaattcaaactttatatgctgtcttaccctcttcacactttctactcaaggtatttctaggtcccccaacctctctaagttagagccctgggattttatttaggattttgctttcagaagagccattaacaaggacttccactagggggtgaacgaggaaagaggaaggagaggaactaagttgggtcaagtcttccagaaagctcccgaagttcaagagcaagtgaactagctctgaaataagtttttaatctatggtacgaccagggtcccctaccccatggtcgggagtttataaacaaaacaaggaacacaaaggaaagtggggtgggaagggagaagaatggaagggaagggaggagaaaaaaggggaggggaagggaaggtagaggaggggaagggtagggaagggaagggacgggaaggaggcataggtaaccagaaaggactaagaggatgtggggaagaatccagttgccattgcttcttttttttttttctattttttttttttaatttgggggattataatataattacaatatctctccctttcctttcctccttccaaactggggatatcctgagcagggggcatagcttctggtccactactgtgttcttggggcaaatgattgagcccagattaggaaaggggtggggagagagagatagagagagagagagagagaagagaaagaggaagaattgggggcggaggatgtgaggctgggctggagaaatgaaagaaagcaaaccccactggtgacattggcacattcttcctgagcgcagcacgccctccttgtgcaagaactctgagccccaggtgcaggaggctgaggcctgcagagagacttgcagagagacccagcaagccatggtgagcatcccagcctataagagatctctagatattcaaaattttccttggggttgaagaggcaggtggcaagggggcaagaagctatcatttctgcgtttaagaaatatagaaaccaacaaacaagaacaagaacaacaacaacaacaaaacccctacgcatgctgtctcaagaaaatgactctagactctttcttgctgattttctcccttggtgtttgctttgatggaatgctggaaggggcacagataagattagacctttgcggtgacacagagtgactccctgaggagtgatatacatccaaaactacagttttaagatgtgcagaaagcctatggctttgttgtttgagttattaaaaatatattgcttcttacttgaaaaaagcaatgcttgcctttcctggcttctggctacatcattctttcatatatttgaggtatggctccttcatgacccagcgtgaaaggcaaatgtgagtgtcactggttcattagaccccaagagcattaaaaacaagagcattaaaaaaattaagattctgtttgatttaaagctcagtcgaaaagtaggtacaaagaataccgaaatatcggaaagcataacattaatcatgatcaacaacctgggactgaaacctggaaggaaaatgaaataaagtagtgtaccagtgtgtaatgaagtagatgccataattttcagccatgacacccacccccccccaaatagtttaccttggatacggttgatagtgggctgatgggctttatctgtgaattgaagaagtgccagggcactgcctcatggtgctataagtttgcagttcagagtttaaatattttgcacttcatttacaggtgtttccatggagatgtgagggtacttactggggctcgaggaacatcctgaagctgtgggtctggacactgctctgttgtggtatgtcctttgtttttggctaagccttaggcagtgattgttcttttcttaaatattcattgaaagtacatagttgcagggaatacaatcaggtagatggctattaattcttttttttgttccttttttgttttatttttttttgtttttgtattttttatttttggctattaattcttttaaggactctcattctttctctgaccttcagaacttttctgagtccccctaataccagcttagcattgacattctctagtgatgtgcccaaatcctgatatctacacaatagtcctctgttaggaaggagtacagttaattgacaaacctctaataaggcacgttatgcttattctacatttcattttctattaatagtttgctgtgcccaaaatgaacttccacagtccagagcgtgggctgcctgagggctggggttttgtttttattttaggggcttttgtgtctttcttttgatgttacatgttttatgcttaagccttagagactcttcatcaataaatttgaaccattgtctgagctaacttatgttagctctccttcttctctcacctggactttcagctcagaacaagtgaacacaccctctctttgtttttataaatttttctttgcttttgagagtttcatacatgcacagtaaagtatgatcataatgatatgccatttcccccttcaacaacaccatataccccccaacacccctcccaacttcctgtctgtctgtctttattccttttgtttttgataacctactaaatccagttagcactgctcataggtgtacggggtgtggaccatcgactggtgcatgaaaaacctaactgtgaccacaccttcaaaaagaatgattctccctcccccagaaactattaactgacaatagcccttcagtaaggggtggggcctgaagatcctctaccccatccacacttgatcctcctctaggttttatgcagctgcagaaaatcacaactgctacgagttcaaaactgcattaaccatgtcatgtccagaagacagtactcccatattccccaacactacttcccaggctttgtgtctcttctgcaatgagccttggtagatgaggggttaatatgagcgttccatttagggctgagtctctaattctcagcatttaacagctatgcatctctccactggctgctatctacttcaaaaagcaatttctctgacccaggtggagagcagctcaggatgattggcttaagtataaatatttggaaggtatttttgatatgtctttagagtactcaccttatgaagtaaaaactcagtgagctgatggctatgaaatcttttatcttactgtaaaatcatagctcacataggtcatgccattcttagaatggccagtgtcatcaaggtcactgtgcacaatcatgtgttttacttggttgcttcaaatcccttatgcctgaaggcccagttgttaattaggcactattacttaaatatctttgtatgtagaacatgataaaaccaattgtgtgtcttttgcatcatctttatgtatgttgttctttctgtactatgagtttagatacacaattggtctatgtattgaggctttcccagggcagcttcttctacaatagaatacattttatgttacaataaagtatttaaaattatgttaatgttctgcctgaccctattttattttacttaaatgagaaattttatatctgtactgtgacatataataacagtaacaaatattagcctttaggaagttatcccaggattaaaaagtatagtgtagattttaaagctgtattaagttattctttaattaattcttagtgacatacatttctaaagtaggttggataaattacacttcaaagaattttgaggaagatctttcattaaaaaaaatctgctaagatatatttatgtatagtagtcattgagtaaaaaacaattctatatcttttcaaagagagagagagtctatattctgatccaaggctgccaacagctaatttgggtgaccctgaactgctcacctgttctcctgcagtctttgtccctcatctctaagtggtgggcagcctgcacctgtgcctggtcctagaacactctatgagtcgtcatatttctgctgctgttttccagacttcctgatacaccatggaactcactgttggacttaccattattctgaaaagcccatgaactgggaaaatgctagaaagttctgcaagcaaaattacacagatttagtcgccatacaaaacaagagagaaattgagtatttagagaatacattgcccaaaagcccttattactactggataggaatcaggaaaattgggaaaatgtggacatgggtgggaaccaacaaaactctcactaaagaagcagagaactggggtgctggggagcccaacaacaagaagtccaaggaggactgtgtggagatctatatcaagagggaacgagactctgggaaatggaacgatgacgcctgtcacaaacgaaaggcagctctctgctacacaggtaggcagtgtctaggctcctacgctgatgtgggaccaccatagttagagtaataagactcattacccagaaactgctattctgggttctaaaacaatcctaactaagccttaagcatagcacctctgggcaatctgcaggtacacaacaactaaataacgttctatccaggttgtaagtgtgttatgtggggaacagggatggacagactgtgcctcaaggacagacaggaagaggatgctgaaagctaggtggtctttgagggcttttctctaacacctcctaatcatatagacaatttctgtgagttaattcattctaaaagcagacaaacgcctacagccaagtggctattgtatcttataaattaaaagtgtagcgtgcgttatgcaaaaatgttttgaatacttaagcaaatttttcttgttcattataatagtgtcaaacaaaaaagttctttgtgcaaagaagagactctggatgtaatcacattaaaatgtctttgtgtaatctgcttaaagcctcttgccagccagggtcttgcaatggccgtggagaatgtgtggaaactatcaacaatcacacgtgcatctgtgatgcagggtattacgggccccagtgtcagtatggtaagcttcatttgtttgtttgtttgttcctgctggtgttcattagacccataatagcttagcattgctgtgcagagtttgtgtcgtgttggctttgcttactgacttctctctgattctgcatgtggacgacacacctggttatcttcaaagcatagttcagaggccatttcttcccacggtatttctttggacccctaatacagacaaacagttatcaagtagcggaaacaagactcaactccatcgaatcctcataactcttctcaaccctgcttctctctccatgaaagtggtccagtgtgagcctttggaggcccctgagttgggtaccatggactgcatccaccccttgggaaacttcagcttccagtccaagtgtgctttcaactgttctgagggaagagagctacttgggactgcagaaacacagtgtggagcatctggaaactggtcatctccagagccaatctgccaaggtgagtgactttagagtggatcttcgttgttgggacaaaataataccagttgggacaaatcaatattagcagttctaagaaatgggaagttccaaacagaaagctaaactttcacaataatatcttcctgtaaagatttcccaagtcagcatgaagtttcaatttacttcacaagtggtttgaaatatcacaaggagaaatgtgttgggatttgtcaaaggtgagcaggttacagtaaaaaatggggtattgtagacccttactgtcaaggatgtcacagtcctctgagcttgcaggattaagaactatgaggtcgaatagaaacaattctatttctccctaggagagtgaggtattgggaaggtactcctgttcttctatagacagatgtgacaaggaacagtaaaagaacgaacatctgatacacagaatatgtcagagttatttaataacaaatcctatacacttattttggttgggtatttctggagaatatggaagcaaatcatagattctgtacttatggaatatatatttaatagaaactatttatgttcagggatcaagtttgaaggaaaatgagatgaacaggaataatcctgtggtgagatcccctaataaaatacaggtcctttatttgcaatgaatggccacttggcatcttactgccagcactggaggcaattatcctagaaacagcacagaggaccactgctaggatggccaagaaagagagggtggagtcatcagagtcctaggaagtcactcagagatgcggtgggagaaccggaaatgagagaatacacatgtgcaaagagaaaggctccagctcagccaactactatggaaaggcgcatcaaatcttcagaatgagactaagtttcaaaatgcgttttgatgtgtctgctgcacacaatggaaaattggaagaagaagacaagtaatggctttaaggaataaagaactgaaacaaaaattaatttcagtattaaccaactggactagatctgaccaattcacttatctctgaaactgtgactcttccccagaatgttacctccaccacaccgttggactgccctttagtttactcccctttaaacatcgtgcttgctttcttgatttccatcatatcctttttctaactgtctattttgtttgttttggtttgggttttggtcttttgttttcaagacagcatttctctatgtggccttggcagtcctagaacttcctctatagaccaggctggcatcaaactcagagattcgaatggggtaggaggcatattccaccaccagctggcttctgattgtttggttgactatagtgacttcttctgggttctttcatttgtacttatccaagctcataaactcttagtctcagtatctgtcttttctattattacgacttggtttgtttctttcttcaaattttctgaattttatggatgtatatatacctatgtgatctttggattaacaaatctgtttttagccatgacctccaaatatgctaagaatgttgtttggatatctacgactcaagtgtctccagtcagtttttttttcttttttgtggctgtaattacattccatggaaatgacatttaatgtcatttgtttaatgtcaatctgtgaaaagaaatggtgtgaaactctgccaccctactccaatacttgtgtaagataacacttgataaatcaattttcaaaattttatttcttttatggggctgaagagatggattagcttaagtgcactggctgctcgtacagcagacctgagttctattcccagtcatcacatggtggctaacagacatctctgactccaccccagatgatacaatgccatcttttggcctcctggggctccaggcacagaaatagtacacaatatacttgcatacaaaacacctatacatgtacaattcaataaaataatttttattaattaaaaaataggcactatcacacttggatataatgcacaatgattatattcatccccagccccattccaatcaaatcctcataactcttctcaaccctgcttctctctccatgaaagtggtccagtgtgagcctttggaggcccctgagttgggtaccatggactgcatccaccccttgggaaacttcagcttccagtccaagtgtgctttcaactgttctgagggaagagagctacttgggactgcagaaacacagtgtggagcatctggaaactggtcatctccagagccaatctgccaaggtgagtgactttagagtggatctttgttgtggcaagcttgtgtttatagtctgagaatacaggggagtcttgcctagaagtctgtttcttctgttgctgtataatttaaccagagttgggttgtagtttgatgcttttcaagtgttttgttttgttttgttttgttttgttttgttttgcttttctcactaaaatgaaatgcaaaacaccaaaccaatccaaaccaaacctagctaaacaaaagcaaaagtctttgaagtcatctggcattttataatctgatttacagcaatacattgaagttatactctgtatctttttttctctcattgttatcacataaagccttgatgaaccctagttgaactttggttcctctccttcaatgacacccattttatgtggtggccaacttagcaccaaccagtttctttcaggggatttacaggtctttcttgattgcttcagttggtaggttcttaaagtcatcttttctttgtttttctccagtgtaagctctcaggagaataacaacttctgcaaaaaacaaagccccactcttgattgttttcatttgcaatagagtgggttttcatcctttcttgactgacagggtttatcacatatagatgatggaaaaaaaaacctggtaactctgaagttctggataggctttttacatttatatttatagttccctagtttaattctctaaagtaaaccaaaatctatcgttgacatcatggaactgaattgtaaggaattgaatcagtgataagcctgcttcagggagtaggggtgtctgtcaaagctgcttaaggaaaaggctgaaagctttgtgatcactgagcatgtcccatgccagagtctgccttctgagtctaagactgtatggtatgacatttccagaagtcttgcatgttaccatgctggggcagccttttggaatggctaccctataccaccatgggctgccaatgccttgttgtctctatctctgaccagttatccatatcacaagtctgaaagtacggtccaaagtaattcccacaagttagaaatttctagatttgtatggatggtttcattgataaattctggaggctctggtcaaaaccatgtaatgggggctggaaagaagaatcagtgttttaaagtacttgcttctctcaaggacctgggttgcttcacgccatgtggctcattaccatgtgccatttcctttccagataattctgtgcagcacacacatacattactcacccccataaaagttaaaaccatactgaaacaaaaagctttaggattggcaatgagactgggagggagatgggagaggctaaagggggtggtgcaaagatgaccaaagaacaacatgtataccatctctgaaaatgccataatggaatccatcgttatgcacgattaattaatggtaataagaaggtgaaaactgcctttggtcctgactgccctgttgtgttatgtcctccctgaagtgactcagtgcgcacctctagcagcacccaatcagggcacagtggaatgcagtcactccctggccaacttcagttttacttctgcttgtaccttcacctgctcagaaggaaccaacttaattggcaagagaaaaactgtctgcagatcatctggcacctggtctagtcctagtccaatatgtcagcatgagtaattttactcagaaatactgaaggcttaaagccggagctgatcagctagcagaagacagaaaggagataacaaacacttaagtccctttccctcaatacatgtggcctaagaaacaaatggatatgcagttgtgcactataaaatccttgcctgttcttaggctttcctttcatgataattattttctttctcaactctcctattgctttaaagtgtaaacccattgacatatttatgtatgacccatgtcttctattctgtcacaagtttatttccccgttaatcttttaacaatgcgtcctctaagctcactagtgactccctaactcccaacaagtgaaccgttctctagtaccccaagctgatgtctccccaatctgtctgtgcatgggaaggaccgcagcttcctcatgtgtatacaccgtgcatcagagtacatgaaaaaaaaagtgacaaaataattgtttgttaagttagcatatgaactagcagctaccagtgtctgcccaatgtaaaccgtcttcacagaaaatagaagcgataggccctgaagaagctgtcaaagaagatcgctgggtgtttggagtagagtgggggcagggagcaggaaggtggtaacgaggacattacagcaaggctgtatgccaggttcatcaaatacatttcctttccaaccgacttagttttcatttcctcatcttcagcaaaccaacagttgccaatatgtaaaagtagattccttcacctggaggtatcagaagatagattttttttttcaaattagtacttttcaataagagactgtaagccaacccagtttgtatatccaaagggtagaaatggccttttagttggtttgagtggaaatgaagggcaggggtccaactgcattgctatatatcattgcagaccctgggcatataagcaataagatttttgtgtatctcattcaatgtaagtagtagaagcagcttcctttgatcaacaagttacccagctcagatcgctgacttcattttccttacagtttagtaagctttctagttcttctctgtgctcagatatcaacctttaaacaagaccaggaacgaaacaccatgatgactacttcttgtttgagttttgagatacatccccaggacctccatgagtcacagatctgagaactgtggtcccataggcagaaggctagaggccagtccagctgtatgcataccgtgggccttcccgtgttattcccctcatctgttacatatgttactgttgggggacatcagaagaccaaaatgatgactatcatgagcttgagtaagagaataattctgtggctcatgccatatgccttactgattcctctttcagagacaaacagaagtttctcaaagatcaaagaaggtgactacaaccccctcttcattcctgtagccgtcatggtcaccgcattctcggggctggcatttctcatttggctggcaaggcggttaaaaaaaggtaggtatgttcaataacatcaaagtagaacagtgttcaagtggannnnnnnnnnnnnnnnnnnnnnnnnnnnnnnnnnnnnnnnnnnnnnnnnnnnnnnnnnnnnnnnnnnnnnnnnnnnnnnnnnnnnnnnnnccacacaggaaataaacttatttagttgaagcaggtgccaagtgacttctgtgctttgtaggcataagtccctagagagattgggccttatatacacctccatttaaaaaatccagacaatgtatcatggttggcagaccttttcatgatacgttgctatgaggaacttggctagatgagacactgtaacaactctttggtcctatttctgtatgaaggggaatgcattgccactgtcttctgggagcctgcacaactttgatcttagcactacaatagcattaggaagagagtctatgattgtctaagatttttgaacatctctttaagagtcatataactttccgggtgttgacatgtggttgcccttgggagaaatccttgtggattctctctagaatctattcactgaggtcaccactgtaatctagtataccatatatatgtatgtgtaaacatatacatatttaaacatatgtgtgtttatatttgtatgcatacatatgtagtgtacacacatatacgtatatagtgtactaggttacagtggaggatatatacacatcctaatgatatgcatacacacacagacacatatacagagagagagagagagaaatacacatacatatatccaatatccaataaggcagaaacctgaagaaaaaagggaaagggaaaggagagcgtcctcaaaatcttattctctatcatccaggaagtatataaactctgcacgaggacagaacattcttcttttgcccccttcctccctcctgagtatgcctttgccttcaggtcggaccaacgcaccagccacaggcccacagtctgctgcagttttgaggtgtgcactgccacatttgtccacgtttatctagcagatctactcaaaactgtaagattcacataccccggcagctttaaagattcccccgtattaaggtcaggtactatgagtaacctttgtgactcctttgtgctgcttcctgtggtagaagctgacggccacttagatttcccttccaccagactcaccagtgcacgttgtgtcacccagctcacccacactggcaactgaaagaaaatcgtctacccgtctctgacaatcttcccaccatgatttgatctcctgtccaaatttaaaaataggaggtgatagactcattttccaccaatccataagataatagaggatgcgctatgtaggaacagcactaactataacgtgtcagtactgaacagttcaaacttttcctctattgatggaaattccacggaccttggataccgccatcacacaggatactaagtatcgcctacggcaccagaacaaagctgagattgacacttttcttcctcttactgagacttcaaaacctcactccaactgtcttgctgccttgggtggggcaaagaggtcatcacacatgctccctgagtaaggtggccattagctcagtgacttcaaggagtaatgaggacgacaaggactcccaaatttcatctttttcagaggcagttgtaaccacaaaggaatttagtcaaagtcacccgtatttggtgggtgctagctggttaaggctaccttatgagtggggaggagaaaagctgtaggttgtttttaaagtcttaactttggagtcagtcatttctgtagacgatctcaaactgataacaagaaaacggcatgcccctgctgtgggaatctgagtagggcaaacaggaaacagataacgggtacttgggctagtggcagttatgccaccaaagagagtagcggttcccagagatcactaactctggagggaaaactcggtgtaactatgctgtgtccaatggtcttcaatcatgaaacagccactcatctctcaagcttgcaagggaatggctttgtcttccaaacattttagccataaattgactctttacaacatgaatcatgtccctttttttctatagagacactgatctaggtccctgagataaccctataggtgttcaatagatatgttgataagaatcatagtgaaaataataattctatatccatacatattacgtacatgttatagttttattgggttcatcagactggaaaggggacatgtgacaattcagagtatgaaggccaatggggtgacaaagcattcttctctcaggtggatgctatgacctggtgcaagggctgcctatgccctaatggtcttggcttctggattccctttaactcttctcctgggtccacaaacaaggaccctggccatgtgctctggtagaaacacttggtactcctagcttttctcattctccaaggcaatggcattttttttaggccaagctctaaaatctctttaagcaggagctcaaggcagaaatggctctttcctctgaaatagcacccctaaaaagcacttgctttcagggttacaaggcaatgctgttcctcaggcggaagaaatttccacctgacccaacacactggtttagtacagaacatgaacttgaatgcattctctcttagttctcttttcttcagaaagacacttcctcagtaggacaagacactctctcagtaggacaagaaattcccttagtaggacaagaaaatcccacagtaggattctgggtcttgtttacctattgtcattactttcattgttccttgccatatacatatggcaagaaatctcagaaaaggtagtgtgtgtgtgtagacgtatatatacacatatatttatttgtgaagatgtacaaatggactcaaacttgattattctacctaatctgtatatttggtccatatcatctacaagcaaaattttgaaagactagcttttatagaactttaaaatatcaaagacacaattgagtactgtctattatgtgccaagcaatggcctaaacattttaaataccgttttttttaacccaacaatgaatttaacatctatgtgggacaattctagactagcagtttacagccactgaaaaacaccaaagccacccctctctcaaaggattctcctttctcagaaagctttctttctgtttctttttcttctgtttcctacagacctcatttcttcacaccactagttaagcaatatttaaataagaatgtgttttggttcacaaaatgtactttgtatagtcaactaaaattacccaaagagtaagttagaggagagtcccaactgaataagcacaactaagctggagctgaggtttttgtttggacacagaaatgtgggttccagagttctatgcatttggtggaagtggttttcacacctagttccatgtggcctgttcaaaggggaaacagaagtatttatgacatatgaattgtatataagattccatatgatgtatgaaaatatgccgctcaaattggattgcatgatcctcactgattcctactaataagaccagagccaaactctcaggactcacataagagaagctgagagacattgaagtcctttagggaggggctggtaagaggatgagctgtgcctgggacactgggtcagaccagtagggagttcagccaaggctctggctttatgagcatcacagcaggtggagtggagtccccagaagcaggctcatcacactgttctgctacagctctaaacggttactggtaccccagatccacttagcaacagatgggtgtccacttaccaaatgcacaatgtatttccaaagacagttttggaggtgggcataccctttactttaaaaaaaaattgaaattgtttactttttgatgatactttttttttattcttttttctacgtttaggcaagaaatctcaagaaaggtaagtttttcaatgaagaatttccacatctgtttgtttctactttccttagggtgcttcctattatagatagaacacaaaccccgcagtagttatttacctgagcgcctcatacaaatagcatttccagataaggtagttgagtgctagctgccattaaatctttgtgactttgatgctagtggtctgaaacagatggatgtataatatgcctattaagaaaggagatttcatatggtgggaatgtttcctggtagtctctgaattttccttgagggttagaagcatgctgttatgttttttcttgtcttagcttacaggaccaacgtctaacaattgagaaacattcaattcaacaagcatttccaacaactaacatattgtaaaaggaaactgtccaggtgcaggccatcagtcttaacacagaagggtaaatgactactctaatgagtgctggccttcagaaatgagaaagagcagtggagcatggaacctacccaccacttccctaaagaagtatttgccccagttggttctcaacactgcagttcttccagtagagtaataatgtagattgttgagacaagatgcagacacatggaagttcctggcctatctggcagaaatgaagaaagggaggatgaaaaaggtggccagagagacagatggaagaggatgaaaaagagctggggtgacaagagtgggaaccatctcaaatgcagccagagtagccatcagatttccagagggtgcattaagggcatcagtgggaaggctatttagataaagacagaggtcagctggagtaaggatgaggaaccatttaggataatcatctggaagcagaatgtgttctgctctcttgagaatttgccacaaagagtgggagagtggtggggttgaggacatgggctcagtagagtctttttactctgtttctattgctgtaattgtgtagataggacccaagtaagaaaagggtctctctggggactggcctccctatctctgtagcaggaaacccacaggatgtaaatatttcttctgtgttcccaccagctgagtgaaagttcttttggcatatcctacccagagctgtgttctggccgcagaaacacctgctttgattgctactgcacggaagtggttcacttcatttcaaggatgcggtggccagcaagagatgctagtcaaaaataattagcataaaattgtctaatagatttaacagtttgttgacttttttgagtaattgacaattactcaattaacttttgtttattgaacgtttttttttattagaacaacactaagcttaactgagacactcagagcaatgagtccttgactctaacttcagggaaattcttatctaattgtggaatgaagacagaaatatttagaagtacagaacaatctaaggcagaaatggtcatagttgatgaattttgtaccgatgagaagaaaaatcattgcaagaaaggcagaatctgggagagaaccttcaaaaagttcagactaggaaggtaactcaaacatgggcatgagaagatgcgcagactttcctagagtccctggtctactgagcatctgggcaatgaaggcgatcatcctcacaccagcacatggctttagcttacccaccaggtgtactagaacttggaagctgattggctacctggagttaatctcactgattaactaaggtgataccacttcatacatttttaggctcgaaagactgaggacatcaccttaaaactgactttgtagttaggtaaataacttacccacaggccttgtgacagtgatagttacagtaataaatagtagataaaaacaaacttttatcaaatacacattccatgttgcatactgttttaagtgttttgagtcttaaatggttagatgttgtctgcaatcctgtatagatagggagtgttgtgatccttaataacagtaaagaaacagaaggggaaacgacagtggcttaagggaagtcactggaaaaagggaaaaagctgaaacttgtaacaccagcatccagagacagtatccctgttactcgtatgattctagatccttgatttacttctatgttaggggttttactaccagagcccctcctcttccagtaaaatgacttattttcacactaaaccatggtgtgatggcactgaggaagggtgtggtggaagaaatagggtgtgtctctagaacaagccaaggggggcatgaacttttttttttttctaacttaagttgattctcacaggtctttgttcttgttcctattagtttttggctgatgaatgactccttgggcatttgtggttttgattcttgctggttattttgactcttctgcaaactggttctgtttatcacctcatttggtttctggtttctaaattctacctgggtaaaagctacacccatgatacacaggatacgatgccaacctcagaggagagggtatgtgcgagattctgctttcagaaacatttttatttctacactggcaagcaagtttgcagctgccacggtggtttaccctgacagttcagaacgagaccagagcctccgaatctggttctccttttgaaaggtgcaaaggcacagaaatatggttctcctccaccctttccaggaatggcacagttgtgacatagaacacagtggcacctatttcatgaatataaattcgtccttatctctctaaaccatactccaccagaatctcaaatctggaaccaataccactctcttcctgagtttttattttctccgatctcacattttatctcctacttccccacctctccactgtaaaatcagcatgcagtaacctccacaggttccacatggaaattagcagtattgcagaactatgaccagatgcgatctgggggccagcactctgaacatcatacttcttagagaatcgggacttcaggctgaatcaacgtttacattaaaatatttatttggagagaggggctggagagctgactcagcagctgagggtgtgtgctgctcttgtaaagaacccaagttcagtccctagcatctgcactgagtggctcacaactgcctgtaactctggctccaggaaatttgccccctagaaactgtaaccaagcaacttcagtcatgcgcacgggcacacacacatgtgcgcatgcgcacacatgcgcacacgcatgatgaaaaatcaaaataaatctttaaaacgttggcttggggatactacttgactgtgaaaaatgttgctgtaatgtctcttccacatttcttttaaaacgcttcacaccttgtccacgatctccaactagaagccttccgtgctctcttcttcacgttagtggctctttacctcctctgctagcacttcagtgtttgtggtttccttgcctctgtcacctagagaatgttcacctgtattactaacaaattcgtttttaccacttttaaaagctccttagtttaattttataatctgttgcttctctttcaggatggatgatccatactgattcatcctttgtgaaaggaaagccatgaagtgctaaagacaaaacattggaaaataacgtcaagtcctcccgtgaagattttacacgcaggcatctcccacattagagatgcagtgtttgctcaacgaatctggaaggatttcttcatgaccaacagctcctcctaatttcccctcgctcattcatcccattaaccctatcccataatgtgtgtctatacagagtagtattttatcatcttttctgtggaggaacaagcaaaagtgttactgtagaatataaagacagctgcttttactctttcctaactcttgtttcctagttcaattcagcacagaagctaatgccaaacacagtgaaaatatgatccatgagtaattggaaactcagactccttgcgcatagtacgtaccctatgtaacatcgacaaaaatctttcatttccacctccaaagaacagtgctctattcaagttgggaaagtcctacttcctctgtagacccactatctgtgagtgacagccactgtagctgttcacattaaccttccccatctccttttcctaggagaataattccacacactgcaccccatgatggccaccaaacatcaaagaagggaaaatctcctgcattgagttttagttttgagttttcccttctctttattagatctctctaggttccttgaagtcagtgttctgatgattattaatagttaatgataacacaacccactctcttggagctgatgttatgaagacaacaggtagaaaaattcctgggctcaggctggagtgacacccttttctttccctaacatcttctactcagatacctaaatttaagattcaggacagctgtccccaactcttaccatgtcttttataacttgctccttaacttgcccaacctgtaggctatctcattttctcgcttcactctgcaaggtttataacatgatgaatttaaatacagcctgttttttgtttttttttaaatgttacttagtctatttgtataccagaatatgtgttgtttttttcctagataaaattgtacccttcttgaggggagagactgtgtcagatctcaggagttcctagtttgttaattgacccttggtagatttgtctgactgcagtcagtgaatgaagctgtgtgaggagatttctgagagcttgtgagaaaacaccaagcaaacaagacgagcgtcttctaatctctgttcctctgtaacagggatgtgttctcggaatggtcttttgtgcccctccgaggtgtaaatggagtgggtttgcttcagattatccatcagttaccaatagtatttagaggatgtttccaagaacaggctctcctcctgactgtctatggcttgaactaatgtgaccctaccctcagcactgtacaagctgaaactcatgtgactttgcctaaacttatgtgaccttgccctcaggactgaatacagctggaactcatgaactttgcttatacgactttgctgaggcaagcagaactctgtgagttcaaggctaacctggtctagatagagagttccaggccagccagggctacatagtgagaccaaacaaacaaatggtgagaaataaatgaatgatagagaaagggaaggggagagatagagagagagagagattgagagattggaattatttcccatttcataagtaatgcagtttttatgcacattttacatcttatgtgagcattttttaatgaggaccatggtttgtttgtttgtttgtttgtttgtttttttaagtcacttctgattctattgcaattgcaaagccctttcatcctgtgtgtctaccagcaggtgtcaatcatgctcacacaccttagggttcatcctttggagaagtatagtgcacaagaacagactcaagagttcactaccctgtctgatgcttattcaggacaacagaaatcacagacacaattagatcctagataaggcgtcaggagaaaccaggttttttaaagtagagacaaagttttgacaccagagccagcagacaaatctcgcaggcttaaacaaaagccaagatggaaagaccatcacagtgctctaaagctcatgaagtgtgtactatgccatggtctttggaaagcaaaatcacagatgggcagaaccacaacagcattctaggaaaaaaaaaacctatatgatggtttaagaggggagagaaaacagaagcaggggaggcaagccattcaaaggcagttctcctggctcagcaacgatgagccaggaaggtccatgtgggcatcccgaagcctttgttctctgactaatgggagggtggagagtgggaggaagagtaccgagctcttagaaaggaaaacataagacaaagattctggttaaatatggcttatgcaaatcttcccttattcaaagatcttgtaggaaagtccctcctctgttatttttcctccacatgaatgtatctcctttattcttaatacaggattgagtcaaggatgtaacccaaatgcctgtaagctcacaaagacaactggagaagaggagcaatgggaaagggctccaggtcggaagtgctctttaaatgagggtggtgatcaattctacccacttacaagaaaacaagccaagtttttgaggtttcataaacacagtttaagtagagacactgatacagactggtcagcctctgtcagggtgcagggaagctttcagcaactcttcctcattgggctatgttggcctgtgaagtcagattcatagagattttgagcgtgtaggtagcgtgttggatgatgcactacttgctgtggagtatgtcataaccttctagatagattggctccccttagaaagcatctagagttgtcatagttttctattatagacatacttattaagctgcagagtggtgcttccatcttaatacttaagtaatttaggaaaacaggaaatcatacatggtcaagctatgctctgtgactttaaagactcctgctcctcctcctcctcctcttcctctccctccttctcctcctcctcctttcataagaagctcttggggctgatggtgtatatgaaccagccacaactcagcaactaaggaataacaccagctgttgagtaatgtttctattagtacttctgtccccaaggagaactgtttggagtgatttttctcttgctgatagcaataataaacaaatgctttgggttttttgttttgttttaagatttttcatcctgataatagttaaagtctggagattagaaaccatggcttcttacaccatgcagtgctttcaagggctagctcatgctgcagaagaccagagcttcactggagagtgacacgtcaaaacacccttgagcagcacaagacctctatctcttgatcttttgtgtgtaatgggaagggggaatacctagaacttatatttctgttttctttcagtactgggaattaaacaagagcccttgtgcatgattgacaagtgcccttccattaagctgtgttcctcaggctagttttaactcctaagaactccgtgacttcagatctccttctcatgcttttgaagtttaccagcaaattaagcaacactgtggcttccctgtgccatgtggtttgagcaagttactgacaccctgtatgccaggcttattatcactaagtggtggacagtttagcccgacttttcgtgttagctgtaaggactaaataggcaaatacatgcaaagaacttaggaagaaactggaaaatagtaagcaccagataaataacagctggtgatgcagtgaatatcatctttagtgtcaaagatctgtgtttgtggcatccaagagcattgtggtcttaggtacatgtataagagcattgtggtcttaggttcatgtcttgggcttctccactatcctatgcaatatcccaagacacaaggccttgtgtgtatcctctcccaggaatagtaaaaagcagagagagatattccatgtggccacactggggataggaacaaagaaaggggtccagtgaccccaagcccatgtttcacactactgacaggaactctattcttaagcagaaaaagaactggagtagaggggcaagaggaattaaatagtctctggtaaagtcttgtaagactatttctctactcctgcacccaacccaccatcacaggtacctgtccatcctgtaaggttttgttctaatgggatttgaggtgaattgtgagtcacaatgaagaatctatgatttttgttcggttgtttgtttttgttttattttgtttgtggcaaaagtaccttctacatgcctaattcagactcaggcttatttttagtgcccagattcttcatttgtaaggtaggattaataatagatgcttttgtggatagtggttcaggcagagtctcttaagtgctcaaagtgtgaaaataaaagactgtgaatgctcagccatagatgggacttctgcatcacacacacacacacacacacacacacacacacacacacacacacacacacacgtacatatatacacacttacacaaatgcatgcaacgcagatatacaagcatgctcaaacatgagtacacacacacacacaagtacacatgtgcacacgtatgcacacaaatgcacaggcatgcacatgcacactcatgcacacacatgtactcacacatgcacaacccccaggctcagagagcattacagaagaaaggtagaaagaatgttagagccagatatgaggaagaatattgccctctaacataacatggccattgcattcatgaactgacagcagctgtggctaattgcccaagtagcaagccaattccaaattccaacatggagacaagaggagctcctgagacctccctgctagctggggagctattggcaattgatggctactagagaagaaagcatcacttttcgggggttcaggaaaggtggccactggctggttgcccatgccccaggggatgacccctcatccacacacaacttggcagcattgattggacttggtggattactaatacagaagacctgaagctgtaaataagacagctgggaagatgacttggtgggtaaggtgcttgccttatgactctgaggactagggctggcatccctagaaccaacattgaagctggagctcatgatggactgtgggtgctatgacccctgggtaggacccagagagtgcctatttctgctggcataccatgtgacagaaaatagaggatccaagcacactagtgaaaccttagattcggcctggcacagggcagggactgcttccctcaggtgctggcagcctggcactaacccacagtgccagtgggatagttggcttttccagagctcatgttgattccccattggtccaaaggcagtatttaaaacaaaacaaaacaaaacaaaaagcaacaccaataacaaaaaaccataataacaaatgctcgctgcttcacaatacagtagatttgcacctcgatgctgatctctggagtttatttccccggttcgtgactctgcctccctcatcccctcttacatccctgtttccacagtaaacactgcacatacaaggcagaaacaggaaacttctccatccagctggctagctagactagcactagtattaagctatgaattcagcaagagactgcctcagtatctaaagtggggagtcactgatgaagccacccatcttatcttcaatctcagatctctacatgaatatgcacacacatacaaacattcatacatacttgcacatgagcgcatgcacacacacacacacacacacacacacacctgtaaaagtcaaataaacaaatctgttgaatgttcacttctctaagatactcctgaagaaataggaaacccaaacatctcctgtattgaagataggatacattttacaaagcggggtagtggtccacacctttaatctcagtgctgcagaggtagagccagtgcttaatctcagtgctgcagaggtagagccaggcagatctctgagttcgagggcagcctggtctataaagtgagtcccaggtaagccagggctacacagagaaactgaatcagaatgttaaagtgcttcacaacagaacctgctggccttcatttgtacattgctccattctttgtcaaaactagagccaggctttttttattcttttctttttttatttaaaaaacaaactttttgtatcaaatggagttacatatctttcccgcctctctttcctccctttcacccctcccagctgcctgtccttgaagccctgtcatatccttcaactctcaagatgatagattctttttcacagaacattattgttacacatatacagtttaaatctcaggttcatcaaagaacttgtgtgtagcagccaagcttttcccataaagaaaacaacagaaaatagtcttccaagtattctttacacttatagacacgaaaaaggaatattctccaagtattatgatttgagaacatcttgattcacaaaccagataaatacttatcaacaaataaaaattccagactaacctctcttgtgagactatatgtgaaaaatctcaagcataatattagcaggccaaatataccatccaataaacatatataacatgatacccaatttatttccatgatgtaagagtggaacttctattacaagatccataactacaaataaccatattaacagagtggaggacaaaatcataataaccctcatcaataatcatcaaatgctctcccaacatgcctccttcccttccctcctcctttgacaggtgtcatggctgcactctgctccaaagaccacccttgctactcctctagcctttcatgcataaacaatacccttccttagttcgtgcgttttgggaaacatattaatcctcactgcttctgtcccacattccattgcatactagagatctggtcagtgcattacccagaagtctctgctcctgagcctgtgttttagacacaatacagcaattacctttccgtgaagtctctgcctgcatgtctgtcttctaatctttgggttcttgtcagctcaactcgtgccaatctccgatctctggatactgagcttgggatttgaacagaaaatctcctaaatccccaaatttagataaccccaaattctataactgtgctttataaaagtcagagttcaatcaagaaacaccctgatccaccaattcaggtcttgcagattacaaaacctttccactcaccactgcccttcattagaataacggtgcatacagcaacagaactggagccaaacccctacagtgaactgcaagatcattctagaccttcactttctccaggcacagttcttcctgaaaacagcagcagcaataacaacaacaacaacaacaacaaaacaacaaccactacaaaaacaaaacaacaaaacaaaacaaaaaaaccaaaaaccaaccaaccaaccaaacaagaaaaactttttaacattcagttagcctgacatccaggaagttcctttgactttggctgtggcgatccattgtcattttgttttttttttttttttgagagagcactagcccagatagttctaaactggctgactcatgaagcaatatcgtggctacagatgacacaagagaatttatttctgctaagatttgaatgttttaaaaagttttgatagaagttggtggtattggtgaaaactttgcctcctggcacagggtgacaattaaggtgtgttagagtttgcttttcttcccagtgttggcactactgctctaaggccctgagagaaaggggcgaggggggaagaacctttggcaacattccctgaggttataggccaccatttccccttcctactgcactgacatgcaattgctggcaaagccctaacaattccctaggttagctctcttgtgtccacatttcccaaacatctcaagacaatgcccgtaagaaaggtctggggaaacttgtaggtttaagtcctgattcatgaaccaggcaacagcagcagaaggaaatgcacgtgacattggtgcaatagggtagacgaatgcaaactgaggataaatgtagctttttgctttgtgctgctggcaaggaccatgccaacagactcacttttctcagcggtaactcattatgttatgctatcctgttcatctgattagctattgattcatctattgttcatcagatagacaagtggctagctgtgctatgaaattccattcttaagtgactaccactgaccaaaaagtactagctgtacctaatctatttctagatgcagggaaagaggaagcatagaatacagtcggttgtcctgtagctatgagcatcctgaaagatgttgaaagaacggttgagtaagcatatgatacaatcacatcactaaccagttttctcaggaagctgtttaaaatagccttcatcctccatcactggatatagccaattttatagattggggtacagccttaggtatggagttcactgtatgtctcgattttcatggtttaagacgagcacattagtgacatcaactagatagcttcatggaattgcttgtcattccttccccaggtaataggtgaagcaggcaggataacactacaataaaggataaactggaaagtatgtaaaagaatcgtcaaaagtggtggaaatccggtggaccttgaaaacacagcatagctccatagagagaaaagtaaggtttcttgcacctttttctaccctgaaattcatttcagagccaggattcctatggcagaagagctggaggctccacatggtctcattgctgtttctgttgacagtacaggagactcctcgaccgctacagtctctgaacgtagtgtggaggggggctgctcaaagtacagttacacagtcaacagagctctccgtagttcacatctaatctgagcaactgaggatcagtgttagcagtaacccttctggtagagtgcagccatcctgaggctagctactgtccatagcatatctccatactaaagactactgtgattcaactacactaacacaagcagcagcctcatttctccaactatcctgtccaggcccagccgcaaggcccctacactggcttccaaacatatgcaatgccctatctccaccaaacaggtaaagccttggcttaatggataactgggtagcagccttggtgtcttgccaggcactggcctacagcacatgtatccttctaccacatcccaacaaccatttaagttccccttccggactgacagcacaccacatagctggccatcccatagtaactgtacaatcaaacccaacctgacagccattgagtggttaccatgcccatattggtgagtctgctacaactgtcctgtcctaaatgtcatcatcacaagcctgggatggtccccaaaccaaccaactagtaatccccatcctccagttatccccatcctctagttatccccatcctccagttatccccatcctccagttatccccatcctccagttatccccatcctccagttatccccatcctccagttatccccatcctccagttatccccatcctccagttatccccatcctccagttatcctcatcctccagttatccccatgctccagttatccctatccattgtataattagctaattttcaatgcctacacacagacctgaaacagtctcagaatcaaagtaactgcttcccccatggttccactgcacagctggcaaggctgagcccagatgactgtaggcttcatgaaagagagcctcacaccattcgcaggtacttgtgacagcttcttagccagccaggcagtgatcccactcccaggaaagtcataccatgtcaaccacatctatagacatccccaatcttgtccactaacacaactacagaaaccttttctaaggaatacagttgaataaacaacaatgaggcagcaccaactatacacagactcagagctaactgactacaggtaaccaacatcctagaacacatcacaggaaagattactcctcttatggggaaaaaaaccctcctaaaattggaagatgcacctgtttcattagatgtttagatatcagtgcaagggcacaagaaacatgaaagagaaaaaaaatgacacccttacatgaacctaatattcttacagtaataggcaaaaaaaaaagaagatacaaaaaatggaattcagaataacgttgtatcagtgagatgaagagaatacagaagacaactcaatgacatctggatgactgttcatgatctaagtgagacactcaacagagagacagacattgcaaagatgaaaaacttccatttgaatactcaatgactaaaataaataatcaagagtcataataacagactagactgaacagaagaaaaactgcctgaatttaaaggtagattttattttaatctaatcagagatagaaagagaaaagtgttggggaaatttttctacagaacctagaaacaccattgaatgggcaaataatagcattgtggaacttcagacgcagggggaatgaggaaagccacagacaagatcaaacaatagcatgaaggtcctcagctttgagagcaatgtgaacaccctggccaatgaatcctgattagatccaatccaatgaggcttctctgaagtgttacattaaatcagtcaaaggacaatgaaagaattaaaaaacaacatggaaaaagtcgagtcacctatatggaaagcaataccaagccaacagcagattcctgctcagaaatattgcagccccaaagaccataggataatatattctgagtgttagaagaaaataatgccagtgaagtgtactatacaaagcaaagacatccttcagaaatgaagggaaataaagc

SEQ ID NO: 207 - DNA, 2196 bp, Mus musculus
attcttcctgagcgcagcacgccctccttgtgcaagaactctgagccccaggtgcaggaggctgaggcctgcagagagacttgcagagagacccagcaagccatggtgtttccatggagatgtgagggtacttactggggctcgaggaacatcctgaagctgtgggtctggacactgctctgttgtgacttcctgatacaccatggaactcactgttggacttaccattattctgaaaagcccatgaactgggaaaatgctagaaagttctgcaagcaaaattacacagatttagtcgccatacaaaacaagagagaaattgagtatttagagaatacattgcccaaaagcccttattactactggataggaatcaggaaaattgggaaaatgtggacatgggtgggaaccaacaaaactctcactaaagaagcagagaactggggtgctggggagcccaacaacaagaagtccaaggaggactgtgtggagatctatatcaagagggaacgagactctgggaaatggaacgatgacgcctgtcacaaacgaaaggcagctctctgctacacagcctcttgccagccagggtcttgcaatggccgtggagaatgtgtggaaactatcaacaatcacacgtgcatctgtgatgcagggtattacgggccccagtgtcagtatgtggtccagtgtgagcctttggaggcccctgagttgggtaccatggactgcatccaccccttgggaaacttcagcttccagtccaagtgtgctttcaactgttctgagggaagagagctacttgggactgcagaaacacagtgtggagcatctggaaactggtcatctccagagccaatctgccaagtggtccagtgtgagcctttggaggcccctgagttgggtaccatggactgcatccaccccttgggaaacttcagcttccagtccaagtgtgctttcaactgttctgagggaagagagctacttgggactgcagaaacacagtgtggagcatctggaaactggtcatctccagagccaatctgccaagagacaaacagaagtttctcaaagatcaaagaaggtgactacaaccccctcttcattcctgtagccgtcatggtcaccgcattctcggggctggcatttctcatttggctggcaaggcggttaaaaaaaggcaagaaatctcaagaaaggatggatgatccatactgattcatcctttgtgaaaggaaagccatgaagtgctaaagacaaaacattggaaaataacgtcaagtcctcccgtgaagattttacacgcaggcatctcccacattagagatgcagtgtttgctcaacgaatctggaaggatttcttcatgaccaacagctcctcctaatttcccctcgctcattcatcccattaaccctatcccataatgtgtgtctatacagagtagtattttatcatcttttctgtggaggaacaagcaaaagtgttactgtagaatataaagacagctgcttttactctttcctaactcttgtttcctagttcaattcagcacagaagctaatgccaaacacagtgaaaatatgatccatgagtaattggaaactcagactccttgcgcatagtacgtaccctatgtaacatcgacaaaaatctttcatttccacctccaaagaacagtgctctattcaagttgggaaagtcctacttcctctgtagacccactatctgtgagtgacagccactgtagctgttcacattaaccttccccatctccttttcctaggagaataattccacacactgcaccccatgatggccaccaaacatcaaagaagggaaaatctcctgcattgagttttagttttgagttttcccttctctttattagatctctctaggttccttgaagtcagtgttctgatgattattaatagttaatgataacacaacccactctcttggagctgatgttatgaagacaacaggtagaaaaattcctgggctcaggctggagtgacacccttttctttccctaacatcttctactcagatacctaaatttaagattcaggacagctgtccccaactcttaccatgtcttttataacttgctccttaacttgcccaacctgtaggctatctcattttctcgcttcactctgcaaggtttataacatgatgaatttaaatac

SEQ ID NO: 208 - protein, 372 aa, Mus musculus
MVFPWRCEGTYWGSRNILKLWVWTLLCCDFLIHHGTHCWTYHYSEKPMNWENARKFCKQNYTDLVAIQNKREIEYLENTLPKSPYYYWIGIRKIGKMWTWVGTNKTLTKEAENWGAGEPNNKKSKEDCVEIYIKRERDSGKWNDDACHKRKAALCYTASCQPGSCNGRGECVETINNHTCICDAGYYGPQCQYVVQCEPLEAPELGTMDCIHPLGNFSFQSKCAFNCSEGRELLGTAETQCGASGNWSSPEPICQVVQCEPLEAPELGTMDCIHPLGNFSFQSKCAFNCSEGRELLGTAETQCGASGNWSSPEPICQETNRSFSKIKEGDYNPLFIPVAVMVTAFSGLAFLIWLARRLKKGKKSQERMDDPY

SEQ ID NO: 209 - DNA, 41042 bp, Homo sapiens
cactactgccagtttgcaatttaatatatctatctctcaaaagtccagcaattatttcaatccccatttacagaaatggggcttgtaggaatcattgtgagggctaaaggtcaatagaaataaaagggaaaaaattttttaaaaaaggaggtgtaaaaatagcacaagaggaagtaataagagagaaaaaggaaagatactaaaagaaaaaatattgagatgcatagagtaaacagtacagatgctacagaagggaaagatctagttttgtattcactcacctgggagcttaaaacatccacacaagtgctgggcatggtgactcacgcctgtaatcccagcactttgggaggtggaggcgggtggatcacgaggtcaagagatcaagaccatcctggccaacatggcgaaaccccaactctactaaaaatacaaaaattagctgggcatagtggtgcgtgcctatagtcccagctactcaagaggctgaggcagaagaatcgcttgagcctgggaggcggagtttgcagtgagcagagatcacgccactgcactccagcctggcgacagagcgagactctgtctcagaaaaaaaaaaaaaaaaaaaaaaaatccacacaagcgtacatgctaatgtgcacacacatacacagagagatatattcctaaaccctaacccacaggtaatttgccctgaagataatgaaaattaagcttcagggcccattacttagataaacctttaaattacaagggcctgggtcctaggaatgtgtttacatggtaatacatctttgtaagatctataaaagcaagacgcttttacgttccttttctcaaagagagacctcaaattatataaaccttggaccctgaaaaactcctgaatgttcctgaaccaacccaaaatattctgattcagtaggattgggagcgaatgttgcgtgtatatttttttgtttttttaatgttaccaagtgatttggatgcacaaccaggtttggaaattactgaaaaaggactataggctgattagtttaaagtgtccctgatgtctatgtggtatttctggagctttgccaccgttgattgggtcatataccatataacactatgtagtttgggaaaagtggacaatgggtaacattcatttgcacagtgcggtgatggtcacatccccccgtgttgagtaattagctatccatctgtatgtactggctgtagcaatatagttcttttcaacaagaaataaagagaattcagacacaacattcacagttgtaaatatcaagaaaacagaataaattcattaaacaaaaatccaattttggaagcaagatatatctgccaacagtgtaactgtccaatgggttccttttgtttgctgcccagataaaggtgatttatcaagatgggaactgcaatagagaaagaatttaattcatgcagagccagccaaatgggagaccggggttttgttattactgaaatcagcctcccccaaaattctaaggctaagatttttcaaggataatttggcaggcagaggaatggttgctgctgattggttgggatgcaatcatagcggtgtggaaaatggtccttgtgcatgttaagtctgcttctgggtggagccacaggacttgttgatgggtccaggtagagccaccagttgaaatgtaagaatctgaaaagacatctcaaaaggccaatcagattctatgatagtgctgttatctgcaggagtaattggcgatgttgcaaatcttgtgacctccggaataacagttggtaattgtttacatctacaccttagcagaattcaggctcctctcatcctcctaacctttcattggtggtcttttattagttttacaaaggcagtttagttttggagaagggctattatcatttaaactataaactaaatttctgccaaagatagcttggcccaagctcaggaattattaagggcagtctggaaggtaaaggcaagatgggggttgattatttcagatctctttcactgtcataattttctcactattataatttttgtcaaggcagttttaatagtgcagcatagacttgaaataaataaggagaaaccaggtggggcatagtggctcatgcctataatctcagcactttgggaggctgaggcaggtggatcacctgaggttaggagttcgagaccagcttggccaacatggcaaaaccccttctctaataaaaatacaaaatcttagccaggcgtagtggcatgcacctgtagtcccagctactcgggaggctgagacatgagaatcacttgaaccagggagatggaggctgcagtgagccgagatcataccactgcactccagcctgggcaacagagtgagaccctgtctcaaaaaaaaaaaaaaaaaagaaacaaataaacaaacaaacaagtaaggagaaacctgatggttagaaataaggaaatgtttaatggcctggaggttcaatgaggtagaagtaaaaagcattgcaatgagatacttgagcaatacacttgcaagaataggagacagtggttaaagagtgaagtgtttgaacatgtgactttagagacggtacagtcttaggtgttgtcgaggttgaggctgtgcctagggaaggaggtagctcaagtctagtggaggaaaatgtcattggagagctgaggatctgggctgtggtattggttgtgccatggatggtgaagtcccgtaagactatgagaagtgcttacagggaaaggaagatcaggaactaggtgccaaagccaatcttgcatgaggagttgagaggtcactacaatgaggacagtgagatggtttatctcagtgtcacaagcttcaaagaagcagagttattttatttcttctttgtgtgtgtgtgtgtgtgtgttttacaagagggcagatgaataaacatatataagaggcactcattataaaggagaagattgcccctgccttccaaccctgaagtatgtgctgtgtggagaataaatattgtcatcttgagagatctgcaggggaagtgatgtcctagggaggcagtcgggctaatgacaaagcaaggaggtaggagaaaagtttgaacaggaaactggaagattgaggggagtttggtgatggtgaagacaggaatcccagagatggcaaggaagcatttgggatgaaaatcaaggttgggtcaggagagaacagtttaggtgaactgtgtaggagatagatgacagacagtaagaggggcttacatgccaaatgtaaggaaatgtgagccatggtgatttgtcctgataggattgtggaggtaggtgggcagttagttagttctctactgcacattccttttacccatgataaactgatagcaactgcagtgagtgcagccttggttggcagcaatgagcaaataaatcttgcggtcatctgtaatggaggcgtaggctagggaagggttgggtagtggtcctttgaccatcccttggacccagggatgctgctttcaatggcattcactggtacttccctcatgtctcatggcaggcaaacggttcttcagcactgggtcctctctccagggttttgtgatggttttataatgctcaccaactcgatctagttctaccttttgagggccacaaaacagtctaataaccactcttttccttaccacccatcaaatggctgttaatatatctccatgacctttcctattccaaatcttcttttggctgaatgtacattaaatatttttttttattgaggtgaagttcacacaacataaaacaaccatcttaaagtgtacaatccagtgacgtttatcgcattgtataaccaccatctctgatatggtttggatccgtgttctcactcaaatctcatgtcaaattgtaatccccagtgttggaggtggggcctggtgggaggtgatttgatcatgagggtggggtttctcatgaatgatttagtaccatcctcttggtactgtcttcatgatagtgaatgagttctcacaagatctggctgtttaaaagtgactgtcacctccccacatccctctcttgctcctgcttttgctatgtgatatgcctgctcccctttcaccttctgccatgattgtaagcttcctgaggccttaccagaagctgagcagatatcggcaccatgcttcctgtaaagcttgcagaagtgtaagccaattaaacatcttttctttataaattaccaagtctcaggtaattctttataacaatgcaagaatggcctaacaaaatgtctatctagttccaaaatatttttatcagaagaaaactctgtaccctataagcagttagtccccatttcttcctcagcccctgggaacctctaatctactttctgtctctatggatttacctcttctatatgtttcatataaatggaatcagacaacatgtaaccttttgtatctggcttcttttggaacaggaattaaaagaaattaaataatgtgtaagcggaaactcagttgtatgtaacaaaacccaactccccctgagaaagagaaagagctggagccctttaaaaattaactgcctgtttttctgtggctagtgagacttacctctcctcctttcccaggcattgtgaagaccctgtttctctagctgtgcagctgcaaggtcactagacagataaactcaagtcgcaaaacatgtttcttcttgaaaagtaagaaatgatgtaatgcatgtctcaattaattgaataactgtctttatttctcacttctgtagtatgcttccccctgcacagatacccctctctcccaccccacaaaatgcttaaaaggtaacttaactctttgttcagggctcagtcctttggatgttaatctgacttggccagtgcacctaaataataaatatcctcctgaaccccatcggtctctctgatttcttaaaaaatcccgcaatatttccactaccaaaatttgttgacacattggatatgacttgtgaaaaaaaagagaggtgtctcagttaactccaaaagttttggtctgagtaactggaaggatggagttataatccactgagatggaaaggctgtgggaagagccctacagattggaggagaaattcagaagttcagtttgggatatgtaaaatatgagaggcttattgaacaactaaatttgtttggggatggagatgttgagtaggcatttggctacaggagaatggttctggttgtacagaatttagaattcgttcgcatttaaatggtattcaaagtcaagagtgtgaattggaccaccaagttagtgaggttagacacagaagagcaaagcggtgatctctggagtactccaagggtttggaggttggggagatgagggagaatcaacacatgatacagaagaaatagccagtgaagtaggaggaaaaccaggagctccctggtgaagtaagatgaggatggagaataggctgtttgtgttagtgaagtgtaggaccttggtgagagcagtctcagggaattggtgtggctgaaagcctgattggacaagcttcaagacagaattacagcctgagcaacatagtgagatcctgtctctacaaaaataaaaaataaaaaaattagtcgagggttggggcatgtgcctgtagtcttagctacatgggaggctgagggagaaggggcactagaccctaggattccttgagtgcaatgagctatgatcgcaccactgcactctagcctgagtgacagagcagcattcccatctcttagagaaagagagagagagattgagagaattagaggagaggacttagaaaaaagtaagtctagatacttctttcagggtatagtgggagcactggcactttcacaagtctccctggctccacgtttttccccattttaccatgtcttccaagttcctgccataagttcagcttaatgatcaagagcatggatttggaactgattggcctctgttcaaattcccaaccatgtctcttactagttatgtgactaaggcaactttctttttttaaactttttttaaattatactttaatttctgggatacatgagcagaacgtgcaggtttgttacataggtatacatgtgccatggtggtttgctgcattcatcaacctgtcatctacattaggtatttctcctaatgctgttcctcccctagccccacatcccctgacatgccccagtgtgtgatgttcccctccctgtgtccatgtgttctcattgttcaactcccacttatgagtgagaatgggtaatgtttggttttctgttccagtgttagtttgctgagaatgacggtttccagcttcatccatgtccctgcaaaggacatgaactcatccttttttatggctgtatagtattccatgatgtatatgtgccacatcatctttatccagtttatcattggtgggcatttgggttggttccaactctttgctgttgtgaatagtgcctcaataaacataagtgtgcatgtgtctttatcgtagaatgatttataatcctttgggtatatacccagtaatgggattgctgggtcaaatggtttttctagttatagatccttgagaaatcgccacattgtcttccacaatgattgaactaatttacacttccaccaacactgtaaaaagcattcttatttctccacatcctctccagcatctgttgtttcctgactttttaataatcgccattctaactggcatgagatggcatctcattgtggttttgatttgcatttctctaatgaccagtgatgatgagctttttttcatatgtttgttgactgcataaacttcttcttttgagaagcatctgttcatatccttcactcactttttgatggtgttgtttgttttttcttgtaaatttgtttaagtttcttgtagattttggatattagccctttgtcaggtgaatagattgcaaaaattttctcccattctgtaggtttcctgttcactttgatgatagtttttttttttctactgtgcagaagctctttagtttaattagatcccatttgtcaattttggcttttgttgctgttgcttttggtgttttagtcatgaagtctttgcccatacctacgtcctgaatggtattgcctaggttttctcctagaatttttatggttttaggtcttccatttaagtctttaatccatcttgagttaatttttatataaggtgtaaggaagggatccagtttcagttttctgcatatggctagccagttttcccaacatcatttattaaatggggaatcctttcccaattgcttctttttgtcagctttgtcaaagatcagatggttgtagatgtgtggtgttatttctgatgcctctgttctgttccgttggtccatatatctgtttttgtaccagcaccatgctgttttggttactatagccttgtagtatagtttgaagtcaggtagcatgatgcctccagctttgttctttttgcttaggattgtcttggctatacaagctcttttttggttccatatgaaatttaaagtagtttttttctaattctgtgaaaaaagtcagtagtagcttgatggggatagcactgaatctataaattaccttgggcagtatggtcattttcatgatattgattcttcctacccatgagcatggaatgtttttccattcatttgtgtcctctcttatttccttgagcagtggtttgtagttctccttgaataggtccttcacattccttgtaagttggattcctaggtattttattctctttgtagcaatcgtgaatgggagttcactcatgatttggctctctgtttgtctattattgctgtataggaattcttgtgattttttcacattgattttgtaacctgagactttgctgaagttgctgatcagtttaaggagattttgggctgagacaatgggattttctaaatatacaatcatgtcatctgcaaacagacacaatttgacttcctctcttctatttgaatacactttatttctttctcttgcctgattgccctggccagaacttccaatactatgttgaacaggagtggtgagagaggcatacttgtcttgtgccagtttttaaagggaacgctttcagtttttgcccattcagtatgctattggctgtgggtttgtcataaatagctcttattattttgagatacgttccatcaatacctagtttattgagagtttttagcatgaaggggtgttgaattttatccaaggccttttctgcatctattgagataatcacgtggtttttgtgattggttctgtttacgtaatggattctgtttattgatttgtgtatgttgaaccagccttgcattccagggatgaagccaacttgattgtggttgataagctttttgatgtgctgctggattcagtttgccgtattttattgagtattttcgcaatgatgttcatcagggatattggcctgaaattttctttttttgttgtgtctctgccaggttttagtatcaggatgatgctggcctcataaaatgagtgagggaggagttcctctttttctattctctggaatagtttcagaaggaatggtaccagcacctctttgtacctctggtagaatttggctgtgaatccatctggtcctgggctttttttagttggtaggctattaattgctgccttaatttcagaacttgttattagtctattcagggatttgacttcttcctggtttagtcttgggagggtgtatgtgtccaggaatttatccatttcttctagattttctagtttatttgtgtaaagatgtttatagtaatctctgatggtagtttgtatttctacgggatcagtggtaatatcccctttaccattttttattgtgtctattgattcttctttcttattagtctagctagtggtccatctattttgttaatcttttcaaaatgcagctcctggatttattgattttttgaaggctttttcgtgtctctacctcctatggttctgctctgatcttagttatttcttgtctttcgctagtttttgaatttgtttcttaacctctttgagactctttagaatggggataataatcatatctatagcagagagctgttataaagattaaacaatataataaatatggggcgctgagcttcagagtttttgttgttgttattattattttcctaaaaatgcaaatctgatttgcatttgactcattgactcacatcagtgggtcttcctttttattgtccttcatcatatgggtcctaatttcacatgcagtcttataaaaccatctcattttatagtccaagaatattaaaggtacttgtaggctcccaaacctacacggtgaaaagctagagagcatgggctctcttcaggggttaacttcaggaagtgccactaacaaggacgtccactaggtggtgagcaaggaaagacggaggtgaaggaaccgaaacgagtcaagtccactgcttagctctactgaagttttgcaaacatcataaatatgtctgaaatgcagttttgatttgtagtatttgcaatttccaagggccatttaccacaggtagccaagagttagtttagcatttatgaaaaagataggggagggtggtggaaaagaaggaggaggaggagagagagaaggaggaagaggagaacaagaaccaaacaaaaacaagaacaagaacaagtagaagaagaggagcaggaggaaaaagaagaggaagaagaacagcaacaacaatgagtgaaggaggaggagggtaaggaaagatgcataggagaatggaaggaaggatagaaaggagggaaggaagagagaatctagtcacattactttctgatcagcagttcatttttgtctcagtgggaggcaatagaggccagtctaggaaaggggtggggaaagaggaaagagaagtgcaggaggaaggggagggaaaaggggaggaggaggaggatgtgagactgggttagagaaatgaaagaaagcaaggctttctgttgacattcagtgcagtctacctgcagcacagcacactccctttgggcaaggacctgagacccttgtgctaagtcaagaggctcaatgggctgcagaagaactagagaaggaccaagcaaagccatggtgagcctttcagcctaaaagacgtttagatgctcagatagaaactcttggggttgtagaggcaggtggcaaggataggaatcaccccatttcaattctggttttaaataatatagaaactaaacattttctcagaccctcaaaaaaagtgatcctgaaatctttcttctcagatatgctgatttcctcttcttgactttgtctctggggagactcttgaagaaatactattgaaatcagatcttttgcaataaacactgtgtctacctgagaagtgatatgctttggaagatagaatttttttaaaattatactttaagttctagggtacatgtgcacaacatacaggtttgtcacacatgtatacatgtgccatgttggtgtgctgcacccattaactcgtcatttacattaagtatattttaaggtgtgcaggaaatttgtgactttgtcatttcagttgctcaaaaaggtatttctttttattaaaaaaagaaatacttttctttcctggtgtctggctatctaattttttttttttttaggtatttgaggcattgacccattatgatcaagagtgaggctataacattaaatataagcatcaatagttaattaagcagcaacaatactttaaaaaatatacatagtaaatattaaatagttttatctaatagctcagcagaaaagcaggtataaaaattaccaaaccatagaaaaaattcagggcagtaccgattagcaacttgagactaaagcgtaaaaataaaatagaacaaaacaaaactgtgcatcagttctgatgtaaatttgaagtaatttttcatctatgtctgagaaacctgttacctcagacagggttagtagacatatgtgttttattctgattattaagaaagttgtaagcaccacctcaaaggctataaatgtgtggtttaagagtatacatctaaatataattttgtatttcatttgcagatatttccatggaaatgtcagagcacccagagggacttatggaacatcttcaagttgtgggggtggacaatgctctgttgtggtatgttatgatatttatatatcgctaagtctattttacttatattcatttttcttaaatatccactagttatacatagtctaagggaaaattatttcacagagctgttaattctatcccttctgtaaacatctcttttcttcttacctttagttcttccccagaaactcctgaacactatttttaacctataatagcccatgctgtagagttcaaatcccaataaccccacaaaatccctcaattataaaggaataatgttaattaagaaatctctgttaaggtacttacaatctgtaccaaatatttagcacctcattttctattttttattcatagttcagtgtacattaatgtcatttctacaattacaatacgagcttattaagggacgggggtttatcattttttggtccttctcccattgttgtgacaaattttatatctgattcttgaagactctccagcaatagctttgaacttggtttttcatttcctaagtaaactaatgtcttctttctccctagcctggattttcagctctagccaagcaaacatgctaactctcccgttcacacattccttatgccatgtctgcactgtgtcacatagaaacttagtgctcttttcatacaacaggtattttctgagtccctacaatgtgtgaaatttatgctaggcactaaggatacagcagtggacacaacagttttttccctcttagaacttgcattctagtggaatgctcattcaaaactctgttcaaaatgtttattttatgatgctctttaccatcaattatatctgtttctttactgtattaaatagtgattcatgtagatcataccatgcttagaatgccatatattattatgaagtcattgtgtaattatgtgtttaattagatatcttcaaagccctcatatttgatgggtccatatgtttattaaacatcatcagttgagtctctttgtgtatagaacatgatctaatgaatttcataatcctataccatttggctttgtaaattgttctttttaaaaattatacagttagatatataagagttgagtggtatattgggcttttccagaagcagttcttcctatggtaaaataaaatgttttttatgtaaaagaggttacttaaaagtatgtcactgttcttcctgtccttattatgcttctcccataggtacatatgtgttggccttcaagaaatgattccaggattaaaaagtatacgtaaattgtatagttatatgatattacacggtaattagttgtaaatcattaacagctacaaagaaaaagaaatatgaatgtctaaaatatgttggttaaatttcacctgaaataattttgagaaaaaaattaataagaaaataaacctagaaaaccactaaatttgtttcaaatagaaccttagataaaagcatcttatattcaagccagaaggtctaggttctacttcaaatctgcaaacaactattctgtgatcctgagatggtcacatacactcttaggctctgtttcctcatctctaagtgtctagctcagcctggagtagtgctaggttctttttagctgtaacattatgtaagtctgcataggtcacactgatgtcttgcagatttcctggcacatcatggaaccgactgctggacttaccattattctgaaaaacccatgaactggcaaagggctagaagattctgccgagacaattacacagatttagttgccatacaaaacaaggcggaaattgagtatctggagaagactctgcctttcagtcgttcttactactggataggaatccggaagataggaggaatatggacgtgggtgggaaccaacaaatctcttactgaagaagcagagaactggggagatggtgagcccaacaacaagaagaacaaggaggactgcgtggagatctatatcaagagaaacaaagatgcaggcaaatggaacgatgacgcctgccacaaactaaaggcagccctctgttacacaggtagggagtgacaagacggctatgctgcctcagactcaggaagggccacggttaagagaatactcagatttaccccatggaaaggtggggggatgagaacagcttctggttcattctaaaatacatctagccctctatataatcttgcatcgtgtcactcctaagaatttttggtgtgtaagatttgtccctgtgcacaaaagctatacccctaaatcaagttacatcaaaatgatagatctacgtaggaagtacagaggaagagctagacaatcagtgcctttgataataaggcaggggaggagaagctgacagctggggccagttggaaacttaggctcacatcacctcagttttcacattgtgaagtagagagtgtggtgctgcgtgcttccttcttggtctaaccttatataattttatataaaaattgcactatctttggtgtatgaatatttctgtaaaatcttctacaattccaaaacagccagcattttccaagtgatgttttaataatgaaccatagttaatttggtctcttataaattggactctaccgttttagcaaatttggactttttaatctttgatttctataaagaaagggattgccaagaaataattgcatgcagaaatgattgaggtcaggtcatcatttaaccttctcactcattaaaaacaagtaatttcaagagtttcaaggtatgccactaagtttcctataagtgttacagaatattagtattggtaatttcattccaaaagcaaataaatgcctatgactatatgcttagtgtattttatacgtaaaaattttagcatatgatttttatgctatgaatttacaaataaacctttcctgattatttaaatcatctcagacaaaaggttatctatgtctaaagaaatgactttgagtactaaaatgtaatcacattaaaatattttttttctgacctccttaaagcttcttgccagccctggtcatgcagtggccatggagaatgtgtagaaatcatcaataattacacctgcaactgtgatgtggggtactatgggccccagtgtcagtttggtaagtctctttcctttctttgcttcttcttaggtaaagtcacaggaatcattatagcttatcatgaagctggttggaacaaaatgatactagccactctgagaaatgggaagttttgatcagaaagctctgctttcacaatattgttacctttccgtaaagatttcataagtcagcatgaagtttcgattcacttctcaacaagtctttttgagtaccacaagaagcacagtgttgggataaaagctgtcagggttaccataaggaattagcatggtagattcccgctctcaagaagctcacgatctaatgagcttgttagattaattagaactctaaggtctggaagaaactatgccatttatcattaggaggctgagttacccagaaagtatcttgctttttccttctagtagttcctttccttcttgcagttctccacacttaacacatgtgctctgtagcacactgactttgctggtggccttctctctcattttgcacatggccaaaaaacatgtcatctttaagacattgttcaaagacagtttcttctaggaagctttcttagttctgatagctccacatatttcttcctcatttctcccacttatgttgaagtcatctgttcacttgtccgtctcctctggtactgaaaacttcttgagatcagtaagtgtcctatttatcattgcatctttgggatccacaaaatgcctgtatatatgaggcacttgcttgtgagcctgaattgaattggacaatttaattttttaaaaaagcaatgtttgtaaacaataaagaattaaaaccaaaatacatttaaatgtcaaccaactgaaatagatctatagatctaactcatttcacttgatccctgggccatgactccttcctaatactttaccctcaccccatttttgaactctattttttaacccttatgttattggtatgcctattttactcatttttaattattggtatgcctatttcactcatttttaacattttacttttctttgtcttggtttctctcatatcactcttttctcattctttctacctgtgatcatttctcctgagatccttcatgagcacttatccaggaccataaactactataatttctcagcttttgtcttttgtatattgctcttctgactctaatctacatgtatcctttggtcaaacttactgacttttgcggactcacaaatctatgtgatctttggactgataagcctatctccagctctgaactcaaatatgctaaggatgtcctttgggatgtttaaaagactataaaaccaattgttcccagtcagcttttctcttcgtatttcttatctcagtatgtggaatcaccatttacatgggcaccctggtatgagactctcttaactcccccaacatttatgcagggtaacattctaccaatttttacaacttagtgtttttctaatttgtcttccacttgtcaactctactaccattgccgtcattatctttcttctagattcttgcaatagtttattagatgagttccacaattttaaattagctcccctcaaatacattattcatactacagggagactgatcaattaaaagcaattaaaacacatcacacatacatgacaatccacccattaatttctacctaccattttgtcctacagggtgaaatctaagctcttcaagccccagagtaatgcttgatatataatagatactctttaaatcaatgaaaaaagataacattttctcttagttcccatgtttctccctaatctcatctcatatagtttccaaatacaaaaattcttctgattccttgagtccattcttccttgaagtctctagagcaaggtagcaataatggcttaaatttgacagatgaggaataagacatgaaagttgtactgtttactaaatggcatggcagggtctaaaatgtgaaaactttgatttccaagtcttaaatttacctattgtaccaccaatcagaacagggaaatagatacagtttctggagagggttgtcaaaatcaaaagagttaaaattctggaactgagctagaatagaagacagaattgaggtcaaaatgcttcctagacttttatattctctccttgcaaagaaggcttattatggagacccactctttctctgaacatcttgctcccaatactctagtagactcaggggctctgatgtgatagttatttcccgactaagctggtcattcccagttacacctatttggctttaaggattctcactacagataatgctgaagataataatatgaagactagctaatgtttacttagaatttctgatgagtcaggctttgttctaaggtccttgacttatgctaattgaattacatttagtttccatatcaatttgataaagataacacaatttcattattcctcttatatagatgaagaaactgaagttggagggttcaagtaaccttgtttaaaggcacatggttatcaagtggcagggctaggattcaaatccaggcgtcagttcctcttaactcttccccatactgtttctttccctattgaagtgattcagtgtgagcctttggaggccccagagctgggtaccatggactgtactcaccctttgggaaacttcagcttcagctcacagtgtgccttcagctgctctgaaggaacaaacttaactgggattgaagaaaccacctgtggaccatttggaaactggtcatctccagaaccaacctgtcaaggtgagtaacttcagactagaggttttgtcatgcaatcctgggcttacagtcagaacattcagtagaagtttgctgagaagtcaaacttaggagcctaatttaacctaactttgtttaacctactgtgatgtttctcaaaggacttattctaactaaatttttttgaaaaacctcccaaacaaaaagtaaaaaccaaatacccctgaagccatctcccagtgtgtaacatgacttatagcaatacagcatggttatactgtgttttttatttttctcattgccattgcataaataatgtcttgttgaacctcagttacattttggttcttctcctctcaataacacctgttttatgtggtgtcctacttaataccaaccagtttccttcccagggtagtggaggtctttcttggttgttttatttggcttattcttaaaatcacttttacttttcctcatgcataaacttttaggagaataacaactgaaaaacaaaaacacaatctcttgatcttttcaagtttgaaataaggtaggtttttttttttttttcatttttaactgccaaccttatctccatatgggagaaaaccaatgtcatctgaacttacgaagttttggttaacttttctacaagtatgctcctgatgcattagtttaagtagtttaattcttagaagtgctatcaaaatcccttattgaaattataaaactgtcaacccacctactggaatttacggaagttggacttgcttcagtgaattgggatgtttttcaaaatgcttgggtagatatcagaacagatgaaacggcagagattctctgagaatatcccataagagcccttgatgcagaggccatatggcatggtacttccagcagaaggggagggtcaccttagctagggcagcagcctggagtagctactcctctccccacagctttcaatgcttccttgccttcatctctcattcaccacccaccatcattctcaagaaaataaagcctggaagcaatatcacaagtaatgtagtcaggcagctttggctaaaaatcctttgctcaagggagggtctctactcagaaatactgttttgtcttttttttttttttctttttcattgaagtgattcagtgtgagcctctatcagcaccagatttggggatcatgaactgtagccatcccctggccagcttcagctttacctctgcatgtaccttcatctgctcagaaggaactgagttaattgggaagaagaaaaccatttgtgaatcatctggaatctggtcaaatcctagtccaatatgtcaaagtgagtaagtttgtcctggaaaactgaaatcttaacgatggagctgatggatgagcagatatgaggaaagacatacataaacatttacatgttgttttgctaagaatatgtggcctagaaataaatttgtatgcttaactcactgtaaaatctttggctggtctttcctcctcctttaatgacaatcatttcctttttttgttctcacctcttgccatcttaactcctaaaatctgaactcactgatttactttttacccattcttctattccactacaatctaacatctctgttagcccattgaaatgcctgtaaaaggtcactaatgaccacctacttccccaaataatggatactcctgaatcatcactaagctaatgcctccaaaatctatctgtatatgagaagaatcatgtcttgttcatctttgtataccctccacctgacacagtgcctggcaataggtgctaaagcaaatgcatgttaagctagcatgtgaaagaatagctacctgtgtctgctcctgagactatctgcatggatgacaaaagtctttaaatggtaggatctacagaagctgtcagaaatgctgatctctgtgtgctgcgtgcccagggccagggagtagagtggatgagcagagagaggcagggaggcctttagcagaggactgtgtattaggcctatcagagacatttccctttaaggcctagctagtgttcatttcctcctcatcttcatcaagccaacaggtaccttctgtctggagctcctgggaacttgagccttctctcaatcatatatttgggtgtggggatcaaatcaccttgaaaaggttcatcaaagtaatgggaagaactaaggatagaatcagaccctctgccaatatgtaaaaaagtagattccttcaaatgttagtatcaggagacagatttttttttataccagtattttcaaatagaggctcccaaatgaacttagtttacacttacaagagtatctctaaacatgcccttttacttattcgtgaaggaagtagagggaagtggtaactactgcattggaaagaaattagtgcaggtccttggcatgtaaaaatcaagtgcttatttttgcacaactgctttaaagtaaaagcattaatgatttcctttgactggtgaattatccagttcagatcattggcttttatttttcctgaagttgtattaggcttttagctcttctctgtgtttcagagttccagtcattgaacaagtccatggagctaaatacaacgatgaccattcttgccaacatttttaggtgcattttcaggaactctatgaaccacaaatctgggcattgagattctgtaggcattagactagcaaggctggtccagtctttgcctatgctgtagactcatcaggggccttcccatgccagtttcctcatctgtcaaatggcatcaaatgggctactactgggagatgtaaggaggaaaaaagtcaaatatcatgagatagactaaggaaataatgctggtggtctcatgctatgtgccttactgatttctctttcagaattggacaaaagtttctcaatgattaaggagggtgattataaccccctcttcattccagtggcagtcatggttactgcattctctgggttggcatttatcatttggctggcaaggagattaaaaaaaggtatgtgagtttaacttcacatgaaaagaacacaactttaaagtgaaaaagaaaaaaaaaagaaacccacaggaaattaaatgtgatagattcaacacaagcaggatgccaagctttacattctagagccatcagtccctggagacatgtaaatcagcccaggacacaccttcattaaaacaggttggctgattttcgcttttcatctgataaacttttaaaaatgtctattaccttcaaggcagcttgctaggctgataacaactaagtgagatattctaatggttctttgctcttatgtaattctttaatacttttttttttttgagacagagcctcactctgtcaccaggctagagtgcagtggtgcaatttcagctcactgcaacctccgccttctgggttcaagctattctcccacctcagcctcccaagtagctgggactacaggagcgtgccaccatgcccagctaattttttgtatttttagtagacacggggtttcactgtgttagccagagtggtctcgatctcctgacctcgtgatctgcctgccttggcctcccaaagggcttggattacaggtgtgagccaccacgcctggcctgctcttaattaattctgaaaaaatgacacactatctctgtcctctaagagcctacatgccttggatttcaatgctacaattccactaggaagtgggtctaatgtccactaaggtttcaaggcactgctcccaaatacctgacctcttcaagagtcacctggttcccaacacatgggcattgcattaaccctgggagaaattcccatgtattctcccaagtatctattcaccaaggccacagctctaaccaaatgcaccatatatgctttccaaccatccgtcactggagaggaaaagagaaggaggactgccttgagaagttaacatctgctgcccagattatcactccctttaccttaaggcatgagtgtgtctcagctttaaagtgtgagcaacccactagcctgcagcaggccttgggtgtatggtgccacatttggccaaactcacctggaagaaccattcaaggctgtaacattcatggacattgggcagcttttaagatatacctgttttggccaggtgtggtggctcatgcctgtaatcccagcactttgggaggccgaggcgggcggatcatgagctcagcagttcaagaccagcctggccaacatggtgaaaccctgtctctactaaaaatacaaaaattagccaggcgtggtggcgggcacctgtaatcccagctactcgggaggctgagacagaagaatcacttgaacccgggaggcggaggttgcagtgagctgagaccgcaccattgcactccagcctggtgacagagtgagactctgtctcaaaaaaaaaaaaaaaaaagatatacctgtttcaagttcagggatgatctcgaaacaattgctaaccaactgctctgtgttgcctttctgtgggctcagttgattgtcattttaattttccttccatcaaattagttagtacgtattctgttcactgaatatggtatgtaaaggttgccccctgtccatttacactggcaattacaaaaatattatttatcagtccctaattgcgtgccactctgatcttatctttcatttaaatttgagaatagtgggtgctaggtaagttttctaaccaatccagaaagacaaagtgtgtgaggggggtggggattgttgatatgcaagaacttcattagctatgtataacctgagagcactgagcagttaaaatgtctctgcccttgctattagaaattctgtgctgattgaatctcactatcttatagtattatacagtactaagtactatacagtactaagtataagtatcaagtactgcattaaggcaaaagaagaatgacagttttctccaaccactgattattctttccattgagacttcaaatcttgaccccggttgtcctgtctttcttcctaccttgggcgatgatggcagaactgacggatagagaacagggtgggttattacacactgccccctgggataaggtggctattgtctaaataattttaaggactttggggctgtaagtcaccttaataaggaagctatttatttccgaattctaaaatcttttaataagtgtttgtagaatcaaaagaatagaatcaaactcatttgcatgtagtgaggggttagctggctaaggctgttttataagcaagggtaaaaaaattagaggggttgtttttaaattttttaccttggagtcatttctgtacaagatctcaaaccgataacttgaaaactgctgtgggaatcagtgtggggcaaacaggaaacagataacgggcagttaggctagttacagttatgccaacaaagaaaacagaagccccaaaagatcactggcttggtaggaagcttagggtatctttaagataacattaaatagtcttcatctgtgggccaggcaccttggctgtcacctctaatcccagcacttttggaggctgaggcaggaggattacttgagcccacgagttcaagaccagcctgggcaacatggcgaaaccacatctctacaaaaatacaaaaaattagtcaggcatggtagcatgcacatgtagtcccagctacccaggagactgaggtgggaggatcacttgaacccaggaggtcaaggctgcagtaagccatgacagcaccactgcactccacaacagagtgaggccctgtctcaaaaaaaaaaaaaaaaaaagtcttcatttataaaacaacatcttccattttcaccaacttacaaatgattctgctttccaaagattttagttgtaggttggtcctttaaaacatgaagagtatttttcctatggaggcaatggtagaaataatggctacattcccaggctaaatctaagacaaaatatagttaatggcatttacaaggataaaagtaaaaagtcataaatctctatgtgtgtgtttaggtgtgtgtgtgtgtctatgtgtgtgtgtatatgtatatatatacacagagagagagagagagagagagagaatttataggctttttgggttctaatagttagaaaaagggcacaggtaactatttagagcatggtagccaatgaagtgactagagccttcacccctattcttctgtcctcagatgaatcttctgactctagcactttgtcccctgccctagtagtcttagtatggagactttccctcctttcttttaggaaaggaataaggaacagttccagaaacatgtgtccttgtgcatgggctcatctagacacattttgtgcaccaggcattatcattttctgattagtcactaccattggccctgtttggtaaataaggaaaccagggcaatgatgttttaggccaaatctcaaaaataccatatcagcaggacccagagtcagagattagactccagtccagatacatcttctaaaatcactggtcttcagatttgtgaactggttttttcctcggttggaagaatttcccaccagaaccaacacacagggttagaccagggcatgaaactgaacacatgcccccttagttcctttttcttcaaaatgaaactctctcagtaggaacagattcttactcatctattgctgttaggttcatcatccctaaaaaaaatatttatgtgaagctaaccagaatctgaaattaattcagatttgattccccctgctcaagtgcacttggtcatcagcaggctgaattttagaagaaaagatttcaaatagtagtctttaatactttaaaggattaaaacagtaatgcaacactgtctacgtgctaggacctgaactaaatacttggaaatattttattttatcaacccaatgaggatgatacaattattatgcctctttaacagatgaagaaattgtagtttagaaaagaaagtagctgttcaaatacacactacactacaggtggcaaaatagggctttcacctgggtaggatgattctagaatgccactttacagccactgaaatatattgcctcccaaatgattctttctgctcaaagagttttttttaagttatctacttatttatattctgcttttttcaaaaagaatgtgagaacagtacaaaatgtgttcagtatagcaaattaaaattaattaaaaagtaagaaaaagaagccaatttgggcaacccactcgggtccccttccacgctgtggaagctttgttgtttcgctcttcgcaataataaatgagcttgatgttttattgagtacaaaaaaaaaaaaaagaaagccaaatttaaacttagggtacaaaaatcatttggaaccaaggttgaagttatggcacaaaaatgtatgtcacaaagttttatatacttggtaggagagggtctcagatctagctctgagtttccttacagccagtcaaaggagaaccatgtgatattccttgtgtttgtaagataaaaacacattagttactcagatgaggctgcacaattcctaccaacaagaccaaagtgaaattctcttgtggattctcatagagatgatgctgtgagctgtaatggcacatagttttacagtattagcagctgtccctcaagggaagaatctgcaggtaggatgagatggcagattgggaagggataaacacttgaatggacatattgggtcttgccaccaggcaatttagcaattctgtcttcttgagtagcacggagaatggaatggaacctcaggaggcatctgcatcaacatgtctgttctgtattagtgtctaccactgtttattaagccagttcctcaaatctcctttgacacagatagggtccacctaacaaatacctaatatacttcaaaagacagttttgagagtgggagtcttccttctcccttacttgaaaaactttaaattgtctaatttttgctaatgccttttctctattttctattttcaggcaagaaatccaagagaaggtaagttttattagtggcgaggagtttccacatctgctgattcattctctacttccttaagttacttcctgctctagctagacacattaaccccatagtagtttatttacctggggtcctcatccaaatgaccagataaggtgataaatctactagcttcctttcagagctgtgctttttggtgctagtggagctgaatgaatgaatgaacgaacaagtaatccctattagaaaagggcagtttatgtaaagggagatttttctgattacctcagaattttttctgagggttaaaaacattgtggtgtgttcttcttgttcttaaatatattatttaagaaatattcaattgaacaagcacttattgagaaatgaataaatgcttattcaattgactatttgcattcaattgctctaacaggcattgtccttcagaaatgtgggaaagatagggagcatgaattctacctacagcttccccaaggaggcaagtatttttcagtttggtcttgaagctcaaatttcttctactggagaaatagcacagtgggaggagatgcagacatgtgaaagttgatggcccacctggcagaaatgaagatggaaaaatatttctcagtatctagggtttagtgacttgctctggaattttaggaaggagagtttaagtaaaataaactatgaaaggaggactttggtgacatattcagtacccagctggacaactgagcttcctttaaaatgctagaaatgaagtgagatgatttctgaagggattggatgctggtttgggcaaccatcctaccaatcacaaacttagtatgggccattgcttagaatgcaaaggaaaaagtggggaaaaatgaggcaccagaagccagatcataaactaatgtataagccatgtgatatgggctttatcttgaggtcttttgggatatcactaaaggggtttaaacagtgagtagccttacctctggcatcttataaggtcaccctgcagagcagtatggcaagtgtgggagacaggtgagcctggattcaaagagacttgttttggaggcatttgcagttattagattaaaaccgatggcgcctgtctagggaactagtagtaagaatgggttcatgaaataagaggaggtgatattaactgaatgtgtctgttaattggctaaaagtgagagagaagaatcaaattatcatctttctcacctggaaactggcggatggtagtcctgtttacttctgagaagggaacataaaagaatgagaggttttggaggtaaagatcatgggttcagttttgtactgagctttgggtgtatgcacatcattcactgtggctcattggacctatccaaagcacagaggctatggcaggagaagtggatttgggtccctcacatttcaggaggtaactgccatctcaggagtgggtactatcatccagggagggtgtgagtgctttaagaatggaagaggacctgggagagagtatgggagccagaggaacatcattatctaataagtcacctaagggaaagagaaatgaaaagatgttgccaggcagggagaaggaagaggagaaagagtgtggggtaatgaatgccaaggaaacaaagaaaggggaacggtttcaaacattgccaagagaaccagtaagtatcccctggatgcaacaagggtgtcagtggggagactatttgcagtgcagacatcaagacagaggtcagacggccaagcattgagcattactgaggatgagaaagtagagacagaacaagcagtcatctcttttaaaatgtttggctgtgaaggagaagtggggcaggggtaactggatgaggatgtacgatcagtggaggttctttttattctttttaattactctgtcttctctttactagtgcaaatggagtctagtgaggaaaggcttctttctctgggctggtctccctatgtctgtggcaggaaacccacagatgtgaagatttctttcaaactcgcacctactgagtgaaagtattttctggcacaatctacccagagctgttttctggctaccggaaccacctgttttaattgccactagatggaagcagatcaactagattttttttttttaagatgtccttgaggcacaggaggagagactggctggaagaatattagcaaaaagctaattaccatgctaagcaaattgctatattaagtttaatggttcactgattttttataatcagtcaattaatagttgtttattgaacatttttgtgttggaaactgctaagctttcttgagacagcaagaggagtcagcctggtccctgatttcaggaaaattattacctagctggggagttaagacaggaatatagaaagaaaaaaatcagaaaaatacaaggcagagcatggtaatggccaatgggtgctatatttaagaaggaaaaggtcatttggcttggtggttatagaaaatgttataaagaaggttgcttatgaagaatagataggatttaggtatatggagaaaagcaggaaaggaaggcagtctgtaggaaggaaattgtgtaagcagtggtatggtagtgagactatgaaagcatttttcaggggccactgagcagaactttcttgagcccatggcttattgaggagttgtggagttgaagttggaaaggaaggctggccccaataacataagtcttgaatgcttcaccagatggtctagaaaggcctagcaaagaagaattatttgcccagctctcatttattgaccaaggctgtattaattcataagaatcacagaattctaggtctgaatatgatcttggtggatatcacattcaaactctttttgtagttgaactaattaagtaagttttctataggccttgagcaagtgacagagttagttacaataatcataaacctttatcaaatattaattccatgttgtatactgttatgaatggtttacatgtcttaaatcatgaaatatgcctttaagtctgtgggagaagggtctatgaacatcttcattactgataaagaaacaggcacagagaaataaaatagcctgaggtcacaataaatggcaatgctgagatccatactcatttggatccaggaatcatgctcttaacgcgtatgcttttagaactcaagacccttgactaccagcttagagtggcaagtcccaggcaccctccttttccagtaacgtggttttttttttcacactgaaaccattgtgtgacggcactgaggaagggtggggtagaagtatggtgtgtttttagaacaagtcaaaggtaaaatgaatactatcacactaaacaccatgagcctttttttttttttttaagttcttgggtgaattttcatagtagtttgtgttcatttctattagcttttgaatggtgaatgaatgactccttgggcatttgtggtttcatttcttgctgggttattttgactcttctgcaaaatgactctgtttatcacctcatttggtttctactgtctaaattctggcaggatagaagctacacccaagatacacaggaagatatgatgccaacctcagaggagggcatatgtgaaattttgttttcagaaacatttttttgtctctattttggcaagcacatttgcagctgctgaactgtggtttaccctgacagttcatcatgagaccagctcctcagaatctggttctccctttgaaaggtgctgtgaagacataccatatttcattctctccttgtcctttccaagaataagacagttgtgtcacacaaaaaaagtgtcacttatttctttaaactaaatgtgttaccatctcattaaattatatcccaggatataatttatcacgagtttataaccaccactatttcatgagtttaaattttctccaatttcactttccatttaagcatgccttctaattccttgactttccactgctcaaaatcaatctacagctgggctcggtggctcacgcctgtaatcccagcactttcggaggccgtggcaggtggatcatgaggtcaggagtttgagattagcttggccaatgtggtgaaaccccatctctactaaaaatacaaaaattagctgggtgtgctggcacgtgcctgtattcccagctactcaggaagttgaggcggaagaatcgcttgaacccaggaggccgtggttgcatgagctgcctccgtgccactgcactccggactgggcaacagagtgagactccatctcaaaaataaataaataaataaattaaattaaattaaattaaaataaacataaatttaaaaaatcaatctacactgtccttcagactcattagatctggagacaaagaccgtatgcaccacaaaaatttctccaagtggggtctgtgcgccagtggcataagcatcactaaagagcttgttaggggtgcagaatctcaggctccactcagacctactgaatcagagtctgcattttaacaccatctctgagtggtaagcacatgaaaatctgagaagtgctgctactagggtttgcttacatttgttcatcttcagaggttcctaaagcctggcctcttgtctgagatttccagctgaaagcatttccttgctcctcttctcatctctaatgaatatttacctttactactaacactccaagttttgcaatttttaaactcttattatcttttgtttttctttcagtatgaatgacccatattaaatcgcccttggtgaaagaaaattcttggaatactaaaaatcatgagatcctttaaatccttccatgaaacgttttgtgtggtggcacctcctacgtcaaacatgaagtgtgtttccttcagtgcatctgggaagatttctacctgaccaacagttccttcagcttccatttcgcccctcatttatccctcaacccccagcccacaggtgtttatacagctcagctttttgtcttttctgaggagaaacaaataagaccataaagggaaaggattcatgtggaatataaagatggctgactttgctctttcttgactcttgttttcagtttcaattcagtgctgtacttgatgacagacacttctaaatgaagtgcaaatttgatacatatgtgaatatggactcagttttcttgcagatcaaatttcacgtcgtcttctgtatactgtggaggtacactcttatagaaagttcaaaaagtctacgctctcctttctttctaactccagtgaagtaatggggtcctgctcaagttgaaagagtcctatttgcactgtagcctcgccgtctgtgaattggaccatcctatttaactggcttcagcctccccaccttcttcagccacctctctttttcagttggctgacttccacacctagcatctcatgagtgccaagcaaaaggagagaagagagaaatagcctgcgctgttttttagtttgggggttttgctgtttccttttatgagacccattcctatttcttatagtcaatgtttcttttatcacgatattattagtaagaaaacatcactgaaatgctagctgcaagtgacatctctttgatgtcatatggaagagttaaaacaggtggagaaattccttgattcacaatgaaatgctctcctttcccctgcccccagaccttttatccacttacctagattctacatattctttaaatttcatctcaggcctccctcaaccccaccacttcttttataactagtcctttactaatccaacccatgatgagctcctcttcctggcttcttactgaaaggttaccctgtaacatgcaattttgcatttgaataaagcctgctttttaagtgttaactagtttgcctagtttgttattttgaaattatcatatgttttgttttctccccagtgagattacatgctccttcagggcagagtttgtgtcagatccctggagtatctagtgcattacttgacactcaataaatgaatgttcaaataaatcagaaagagcatacagtgcactgctgatataagtttcagcaaaccctctttctctatggcatctgatgacctgggcagatatcacctaatgtcaacagctgaattcttatgagagaatagagccctttcagaagctagctggaaatacctccttgtcccatggccaatatagatttcatacaaatttgcacacattatgagaataattttttggtaatgattacacttttctttctcaaagacatctcagattctgtattatagcaaaagctgttgcaaaagattctccctatagtacactgtaaatcttggatgtgcaaatcacattcatgtggtttagggtacatcccctggaggtgtacagtgcacacgtgcacagacacacatggcaaccctgacaaaaatgtttattccactaacacatcagggccaaggaacccaaatggacactactccttgtaattatgatgtatatagatttaaaaataaagttctatattcaagctctaggattcctatatgatcttaggaattacataatagtaatcccataaatcaagattcataatataaaattctccagaaaccttggtcttaacctccctgagacttacttcctatgcccataaaacaagaatgaaatttgccttgcttaccccacagggttattgtgatggtaccttaagtatgaaactgctttgtgaactgaatctgaaacacagactttttttttttttttcctcactcaaatcttacctttcatgctttcatggtgtaagattctggttcttatcctaaggctggaacagatggagctctgagtccttatcctgagattagaagccaggaagtctttcacttgtgttccaataggaactcagccctcagattttcactgcacagggtcagctctgccccctgcacttctgcttgcgggaggaggaagggcctgggacagggagtcagaggcatcagtgggaaccctgcctctgtctccgtgatgtgaccctggccagttgttactctctctgaacttcagatttatttatgaaatggggatcccattatcttcgtcacatgattgtgctccacattttatgaaataactcctcctatgctttactcagagtaccaagttcatgaaattgtcagagtcccaggaacacagaattattcattccttctgatttgttcacccaagatcaatgtgcctgggctgtattattgtagtttcctacagaaatagttcaccaaattaaaatctaatttttaaaaaattagctgggcatagtagcacatacctgtagtcctagctagtcgggaagctgaggcagaaggattgcttgagctctaatgatttaatgagaatagaaagaagcaagaaagaggcttcttgtccaaattgcactgtggaaaatgaataaatgtattctttagacatctatatttttccccttaaacttcctcccatctgccagttgacttctctgtacagttctttctccaaagttctttgcattgccctctttcaacttcagcaatttgatttttcccttctgttcaaatgtcctattatggacattttatggaaagaaaatctgccatcaccataacagcctacccaccatttatgacaaaggacagggaaattattaggagaaataatgagatctttacttccctttggcctttgtggccttgtctgatccagtgggccccaacattttatgagatatatacagccttccctgcgagactctgaaagggttttagttaaaagtaatataataattatcacgcgtgtcggtgtgaagagaccaccaaacaggctttgtgtgagcaatgaagcttttgaatcacctgggtgcaggtgggctgagtccaaaaatagagtcagcaaagggagatggggtggggctgttttataggatttgggtgggtagtggaaaattacagtcaaagggggtttttcacttgtgggtaggggtgggggtcacaaggtgctcagtgggggagcttctgagccaggggaaggaatttcacaaggttaatccctcagtcaaggtggcgcaggaacaaatcacaatggtggaatatcatcagttaaggcaggaaccagccattttcacttcttttgtgattcttcacttgcttcaggccatgtggatgtatacgtgcaggcttgggctcagaggcctgacatttctatcttcttatattaataagaaaaataaaacgaaatagtggtaaagtgttggggcagtgaaaatttttgggggtggtgtggagagataacgggcgatgtttctcagggctgcttcgagcaggattaggggtggcgtgagaacctagagtgggagagattaagctgaaggaagattttgtggtaaggggtgatattatggggttgttagatgaaactgtagcaggacaagacacagacaaaacccctcagacactgagttaaagaaggaagggctttattcagctgggagcattggcaagactcatgtctcaaaaaccgagctctccgagtgaacaattccttttcctcttaagggcttacaactctaagggggtctgcgtgagagggtcatgactgattgagcaagcagggggagcaagcagggggtacatgactaggggctgcgtgtactggtaattagaggaacagaacaagacagggattttcacagtgcttttccatacaatgtctgtaatctatagataacataactgattaggtcaggggttgatcttaaccaccaggcccagggtgtggcatcaggctgtctgcctgtggatttcatttctgccttttcatttttacttctttctttggaggcagaaattgggcataagacaatatgaggggtggtctcctcccttaaaacatttgtcgtatagaatgattggtgatggcctggatacggttttgtatgaattgagaaactaaatggaagacacaaggtctgcataagagaaggagaaaaacaggtattaaaggattaagaatcgggagaacccaggacatctaattagagtgcccaagggggttcagcataattacttgcttggttggcaaggtttttggctctatccttgagttttttttatgttgtcatataccaggccagattgatttaggtaaaaacaacactcttcatttaaaaatatgcagagtccccttttttagcagtgagtaaattgaggactcggtgattttggaggaaagagaaattgtaaagccagcaattgtttgttaaagaaggattagaaatggctaggagagagtgagtgagattgatagtgtggtggagatagctggggagaggtagagagtggcataagaatgggaacaagaataagagtgaatataaaagtaaagaatagggctttattagggtgaaagtattggagtgtaccttgtcactgaagatcttctatccactttaagagagacttaagggtggcggtttgaggtaaaaccaggagatatcagttatgatggtttggaggaaaagtataaatcagcactgtaaaaaagggcagggcatttacaagtagttgagaatggtgaataggagtatgactagacagaagattgtagggatgacaagtttttggggcacagttcaagttgggctggtgtctggaatgagactggggcctaataaaaaggagcgtccatacagaatcttaaatgggctgtaccttgtagcatttcgaggacaggcccgaattctgagaatggcaagtggtaaaagtactgtccagtcctttttaagttggaggctgagcttggtgaggtgtgtttttaaaagaccattaatcagttctacctttcctaaggattgaggacggtaaggggtatgaaggtttcactgaataccaagagcctgagaaactgcttgcgtgctttgactagtaaaggcttgtccattatcagactgtatagaggtgggaaggccaaaccaaggaattatgtctgacagaagggaagaaatgaccacggtggccttcttaggccctgtgggaaaggcatctacctatccagtgaaagtgtctacccagaccaagaggtactttagtgtcctgatttggggcatgtgagtaaagtcaatttgccagtcctggggttggggagattagctggacatgatcagcagggagagcacgtgtgttttcatgaagaactatgcctggataggtaatggatgaagaagaaatttgggttgactgaggtaatgggggctgtccatgaagccttgcggcagtacagcccaggtaagttgctgaggctgatgggtgtcagggtcagtccaagtgaaagtgaagagaggctgggatgaagggtgcaaatgaatagtaaagaaagcatgttttgagatccagaacagaataagggttatggaggggttttggagggaggtattgaggataggagagtatatgggtttggcaccatggcgtggataggcaagacaatttggttgataaggcacagatcctgaactaacctgtaaggcatgtccagtttttggacaggtaaaatgggggaattgtaaggagagtttacaggctttaaaaggacatgttgtaacaggcaagtgataacaggctttaatccctttaaagcctgttgtgggatgggatactggcgttgacccaggtaagggtgattaggttttaatgggatagtaatgagggtgtgatttgttgccagggagggagtagaggtgtcccatacctgtgggttaaggtagggggatatgagaggaagtggcaaaggagttgccacttttgggttgggaagaagggcagcaatgagatgtggctgtagtccaggaatagtcagggaagcaaataatttggttaaaatgtctcagcctaataagggaactgggcaggtggggataactaaaaagaagtgtataaaagaatgttgtttaaatcggcaccagagttggggagttttaaggggtttagaagcctggccatcaatacccacaacatttatgaagacaagggaaacaggaccttgaagagaaggtaatgtggagtgggtagcctctgcattgattaagaaggggacggacttaccctccactgtaagagttaccaaaagcatctgtgatggtccaggaggcttctgaggcgatcaggcagcatcagtcttcagccactaagccaagaagatctgggaaggagtcagtcagagagccttgggccagagttccaggggctctgggagtgggtgctgggcaagttggacagtccgatttccagtggggtcccacacagatggaacatggcttaggaggaatcccaggctgagggcattccttggcccagtggccagatttctggcacttgaagcaagatcctgatggaggaggtcctgtaggaatgcttgaccactgtggcttaggcattttgaagttcttgtgtactggagatgtggctggggtttctctcacagtggaggcaaggaattgcaactcagaaatatgttgctacttggctgcctctactctattattgtacgctttgaaggcaaggttaattaagtcctgttgtggggtttgagggccggagtctaacttttggagctttttctaatgttgggagtggattgggtaataaaatgcatattgagaataagatgaccttctggcccctctgggtccaaggctgtaaaatgtctaggagttgctgccaaatgagccatggagtgggctaggtattcatatttgatgaaaaaaagcctaaatactaactgagatgggagaggttggataaagaaaaaggagcattaaccttgactatgcctttagctccagccacctctttaagaggaaactgttgggcaggtgggggagggctagtcacagaatgaaactgtaagctggaccaggtgtgaggaggggaggtgatagaaggattatagggtggaggagcggacgctgaggaagaattggagcctgattcagcctggcggggagcgacctgaggaggagcagtctggggaagaggggagaggtcagatgggtcagtagaaaaggaagattggaaagactcagcgacacttggggttgggactgaggggacaggcaggagggaaagaaggaggatttgggatgagttgcattgggaacagagactagggagggaccgacgtgtaaaagaatgcccagatgtcaggcacctcagaccatttgtccattttacgacaagaattatttagatcttgtgggatggagaaattgaaagtgccgttttcaggctatttggaaccattgttgagtttgtattggggtcaagcggtattgcagaagaaagtaaggcatttaggttttaggtcagacgtgagttgaagaggttttaagttcttgagaacacaggctaagggagaaaagggaggaatggagggtggaaggtggcccatagtgaaggaggcaagcccagagaagagagggtggagacatggagagaaggggttggggggtacttgccccccaggagaggtggtgcttgccccccaggagaggtggtgcttgccacccaggcaaagtggtacttgccactaaggtgaaggatccaggcaggcgtccctgcagtgatcagacagctctgaaatgtgggtgaataatcaggcaggcatccctgcagtgattaaacatcaagggaagactgtctttccaagtccatgaccagtgctggagttttgggttcacagatagaacacgtttcctctgtctctaccagaaaaagaaaggaactgaaattaagggaagggagagattgaagcgtggtgccaagattgaaaggagaaagatgttgagggatagtgagagaggctggagaagagagtaaaaagaggccacttacccaatttaaaattggtgagatgttccttgggctggttggtctgaggaccagaggtcataggtggatctttctcatggagcaaagagcaggatgacaggggactgatctcccaagggaggttccccgatctgagttacggcaccaaatgtcacatggtctgtgtgaagagaccaccaaacaggctttgtgtgagcaataaagcttttgaatcacctaggtgcaggcaggttgagtctgaaaagagagtcagcgaagggagataggggtgaggctgttttataggatttgggtgggtagtggaaaattacagtcaaagggggtttttcacttgtgggcaggggtgggggtcacaaggtactcagtcggggagcttctgagccaggggaaggaatttcacaaggttaatccctcagtcaaggtggggcaggaacaaatcacaatggtggaatgtcatcagttaaggcaggaaccggccattttcagttcttttgtgattcttcacttgcttcaggccatctgggtgtatacctgcaggcttgggctcagaggtctgacaataatatttacttgacatcttggtttgaagcttgatctggtagtggtgttttcaataccaattgttttaacactggtagtaaccataatgatgataacagtaagtaatgtgatttcttttaaaagtttttaaatcttggttgagtgctgtggctcatgcctgtaactccaacaattagggaggtaaaaggcaggaggattgcttgaaaccagaagtttgagacgagcctgggcaatacaacaagaccccatccctaattatttttttaaaagtagctgggcagagtagcatatgcctgtagtcctagctactcagggagctgaagcagaaggattgcatgaactcaggactttgaggctgcagtgagctattattgcatccctgcactgcagtctgggtgacagaataagtacctatctctaataataataataataataataataaagtttgttaggttaaacttatcttggcatccagttatcttagtaggcatccaaatccctttttaggagaaagctatcttcttttgataagcctctaatatagcaggtgtgaccctacagacgtagtgttggcaggaactcaaacaatagtaatatgtaattaaggcactctgtgttaagaaaacttagaggagttaattttctctgctcccgtgagcacatgagaagaaaaaaaaaaagagagaaggtaatgaaagtagagagagaagaactagaaatgtgagaagctgaagagctctgtggcgggaggggtaggggtggcagaagcagcctggcctctggggactagtatggatttaaacagcatgactcctcctctgcatcacactaacctctgtaacatcccactaggaatacaaacccagacctgtatttaggttgctttgaaggaggagtttaaggtgaaggggctgcttctttagtttgggaaagtggatatgaagaaatagccataaaaggcaaaattgggacaaaatattttggtagaaacaaaatatttagaagaaaatcggtgctatggtgagcatgaaaattaagctctctgagaattttgagaactcttagagagggtttgcggccagtatttttaattcattttatctggattttagagagatggtacctgacatctggtttacattcctcatagcatttaatccccggccatagatggtattgtcctcattttaaattttaagaaactgaagctcagagatattagtttgtctaagttcatatagctagacagtgtctatagagttactgaatgtctgtttaatagataacgaaaggtagtttaaaagagctgtgtgtctaatgccatagagaaaagggaataaaaaattacttagaatagatttggtttcaaacactcttgctgaagtgggtagtccaaaagtaggcagccagttctcaattcacaacaaaatcactcttgaaagcaattttgagagaataggctatgtctcttgatttcagcatcctcggaactgacccctatgtcaggaagaaaatagatcaaaatagttgttcaatgacaaaggacacaggcatgtttagcaaaaagagaggcttaaggcatgggacagttgtcttcaattaaccaattaaacatttgctgaaaatgtacgactgcaagacatactaccaggggctatggacacataagggcagagttcctatccctggggatccagcatctggaaggggagggaaggtaaacaccctgaactgcaagctaaggctgtgtgtgctatggctatgctaagtgtgcaagctcagagatgctgcggctcagaggaggaagagatcacttggcaaagggcaacagaattcagaggcaaaattagatcctagatcaggtttaattagaaaccaggaggagagtctagtatctaagacaaaggtattgaagttagagatgttggacaggttatactgccttggcagagacctggggatgaaaaagagatagagtggctttcaactctaaagcttataaagtttgtactctagtttctgggaaaacttgagcaagagtggaacaggatcacaatggtattctgggaagattaaggtgtcagagggtttaggagtggagataaacggaagcaggggagaccagtcagtgaatgtaattattcaggcgtgatgatgagggtggggccaggaaggttcaagtgtaaaccattgtgaaggctttggtctctgactagttggggtcagggagcgggggggttggctgggaggaggtgtaacaaagtattcagaaaggaaaatataaaacaacagttctggctaaatatgacttatgcaaatgttccatttttcaaagatcttgtaggaaagtccctcctttgttatatttcctctgcatgaacttagctgtttaattcttaatata

SEQ ID NO: 210 - DNA, 1875 bp, Homo sapiens
aggaggaaggggagggaaaaggggaggaggaggaggatgtgagactgggttagagaaatgaaagaaagcaaggctttctgttgacattcagtgcagtctacctgcagcacagcacactccctttgggcaaggacctgagacccttgtgctaagtcaagaggctcaatgggctgcagaagaactagagaaggaccaagcaaagccatgatatttccatggaaatgtcagagcacccagagggacttatggaacatcttcaagttgtgggggtggacaatgctctgttgtgatttcctggcacatcatggaaccgactgctggacttaccattattctgaaaaacccatgaactggcaaagggctagaagattctgccgagacaattacacagatttagttgccatacaaaacaaggcggaaattgagtatctggagaagactctgcctttcagtcgttcttactactggataggaatccggaagataggaggaatatggacgtgggtgggaaccaacaaatctcttactgaagaagcagagaactggggagatggtgagcccaacaacaagaagaacaaggaggactgcgtggagatctatatcaagagaaacaaagatgcaggcaaatggaacgatgacgcctgccacaaactaaaggcagccctctgttacacagcttcttgccagccctggtcatgcagtggccatggagaatgtgtagaaatcatcaataattacacctgcaactgtgatgtggggtactatgggccccagtgtcagtttgtgattcagtgtgagcctttggaggccccagagctgggtaccatggactgtactcaccctttgggaaacttcagcttcagctcacagtgtgccttcagctgctctgaaggaacaaacttaactgggattgaagaaaccacctgtggaccatttggaaactggtcatctccagaaccaacctgtcaagtgattcagtgtgagcctctatcagcaccagatttggggatcatgaactgtagccatcccctggccagcttcagctttacctctgcatgtaccttcatctgctcagaaggaactgatttcaattcagtgctgtacttgatgacagacacttctaaatgaagtgcaaatttgatacatatgtgaatatggactcagttttcttgcagatcaaatttcacgtcgtcttctgtatactgtggaggtacactcttatagaaagttcaaaaagtctacgctctcctttctttctaactccagtgaagtaatggggtcctgctcaagttgaaagagtcctatttgcactgtagcctcgccgtctgtgaattggaccatcctatttaactggcttcagcctccccaccttcttcagccacctctctttttcagttggctgacttccacacctagcatctcatgagtgccaagcaaaaggagagaagagagaaatagcctgcgctgttttttagtttgggggttttgctgtttccttttatgagacccattcctatttcttatagtcaatgtttcttttatcacgatattattagtaagaaaacatcactgaaatgctagctgcaagtgacatctctttgatgtcatatggaagagttaaaacaggtggagaaattccttgattcacaatgaaatgctctcctttcccctgcccccagaccttttatccacttacctagattctacatattctttaaatttcatctcaggcctccctcaaccccaccacttcttttataactagtcctttactaatccaacccatgatgagctcctcttcctggcttcttactgaaaggttaccctgtaacatgcaattttgcatttgaataaagcctgctttttaagtgttaa

SEQ ID NO: 211 - protein, 320 aa, Homo sapiens [sequence omitted]

SEQ ID NO: 212 - DNA, 1865 bp, Homo sapiens
aggaggaaggggagggaaaaggggaggaggaggaggatgtgagactgggttagagaaatgaaagaaagcaaggctttctgttgacattcagtgcagtctacctgcagcacagcacactccctttgggcaaggacctgagacccttgtgctaagtcaagaggctcaatgggctgcagaagaactagagaaggaccaagcaaagccatgatatttccatggaaatgtcagagcacccagagggacttatggaacatcttcaagttgtgggggtggacaatgctctgttgtgatttcctggcacatcatggaaccgactgctggacttaccattattctgaaaaacccatgaactggcaaagggctagaagattctgccgagacaattacacagatttagttgccatacaaaacaaggcggaaattgagtatctggagaagactctgcctttcagtcgttcttactactggataggaatccggaagataggaggaatatggacgtgggtgggaaccaacaaatctcttactgaagaagcagagaactggggagatggtgagcccaacaacaagaagaacaaggaggactgcgtggagatctatatcaagagaaacaaagatgcaggcaaatggaacgatgacgcctgccacaaactaaaggcagccctctgttacacagcttcttgccagccctggtcatgcagtggccatggagaatgtgtagaaatcatcaataattacacctgcaactgtgatgtggggtactatgggccccagtgtcagtttgtgattcagtgtgagcctttggaggccccagagctgggtaccatggactgtactcaccctttgggaaacttcagcttcagctcacagtgtgccttcagctgctctgaaggaacaaacttaactgggattgaagaaaccacctgtggaccatttggaaactggtcatctccagaaccaacctgtcaagtgattcagtgtgagcctctatcagcaccagatttggggatcatgaactgtagccatcccctggccagcttcagctttacctctgcatgtaccttcatctgctcagaaggaactgagttaattgggaagaagaaaaccatttgtgaatcatctggaatctggtcaaatcctagtccaatatgtcaaaaattggacaaaagtttctcaatgattaaggagggtgattataaccccctcttcattccagtggcagtcatggttactgcattctctgggttggcatttatcatttggctggcaaggagattaaaaaaaggcaagaaatccaagagaagtatgaatgacccatattaaatcgcccttggtgaaagaaaattcttggaatactaaaaatcatgagatcctttaaatccttccatgaaacgttttgtgtggtggcacctcctacgtcaaacatgaagtgtgtttccttcagtgcatctgggaagatttctacctgaccaacagttccttcagcttccatttcgcccctcatttatccctcaacccccagcccacaggtgtttatacagctcagctttttgtcttttctgaggagaaacaaataagaccataaagggaaaggattcatgtggaatataaagatggctgactttgctctttcttgactcttgttttcagtttcaattcagtgctgtacttgatgacagacacttctaaatgaagtgcaaatttgatacatatgtgaatatggactcagttttcttgcagatcaaatttcacgtcgtcttctgtatactgtggaggtacactcttatagaaagttcaaaaattgaaagagtcctatttgcactgtagcctcgccgtctgtgaattggaccatcctatttaactgg

SEQ ID NO: 213 - protein, 385 aa, Homo sapiens
MGCRRTREGPSKAMIFPWKCQSTQRDLWNIFKLWGWTMLCCDFLAHHGTDCWTYHYSEKPMNWQRARRFCRDNYTDLVAIQNKAEIEYLEKTLPFSRSYYWIGIRKIGGIWTWVGTNKSLTEEAENWGDGEPNNKKNKEDCVEIYIKRNKDAGKWNDDACHKLKAALCYTASCQPWSCSGHGECVEIINNYTCNCDVGYYGPQCQFVIQCEPLEAPELGTMDCTHPLGNFSFSSQCAFSCSEGTNLTGIEETTCGPFGNWSSPEPTCQVIQCEPLSAPDLGIMNCSHPLASFSFTSACTFICSEGTELIGKKKTICESSGIWSNPSPICQKLDKSFSMIKEGDYNPLFIPVAVMVTAFSGLAFIIWLARRLKKGKKSKRSMNDPY

SEQ ID NO: 214 - DNA, 2440 bp, Homo sapiens
aggaggaaggggagggaaaaggggaggaggaggaggatgtgagactgggttagagaaatgaaagaaagcaaggctttctgttgacattcagtgcagtctacctgcagcacagcacactccctttgggcaaggacctgagacccttgtgctaagtcaagaggctcaatgggctgcagaagaactagagaaggaccaagcaaagccatgatatttccatggaaatgtcagagcacccagagggacttatggaacatcttcaagttgtgggggtggacaatgctctgttgtgatttcctggcacatcatggaaccgactgctggacttaccattattctgaaaaacccatgaactggcaaagggctagaagattctgccgagacaattacacagatttagttgccatacaaaacaaggcggaaattgagtatctggagaagactctgcctttcagtcgttcttactactggataggaatccggaagataggaggaatatggacgtgggtgggaaccaacaaatctcttactgaagaagcagagaactggggagatggtgagcccaacaacaagaagaacaaggaggactgcgtggagatctatatcaagagaaacaaagatgcaggcaaatggaacgatgacgcctgccacaaactaaaggcagccctctgttacacagcttcttgccagccctggtcatgcagtggccatggagaatgtgtagaaatcatcaataattacacctgcaactgtgatgtggggtactatgggccccagtgtcagtttgtgattcagtgtgagcctttggaggccccagagctgggtaccatggactgtactcaccctttgggaaacttcagcttcagctcacagtgtgccttcagctgctctgaaggaacaaacttaactgggattgaagaaaccacctgtggaccatttggaaactggtcatctccagaaccaacctgtcaagtgattcagtgtgagcctctatcagcaccagatttggggatcatgaactgtagccatcccctggccagcttcagctttacctctgcatgtaccttcatctgctcagaaggaactgagttaattgggaagaagaaaaccatttgtgaatcatctggaatctggtcaaatcctagtccaatatgtcaaaaattggacaaaagtttctcaatgattaaggagggtgattataaccccctcttcattccagtggcagtcatggttactgcattctctgggttggcatttatcatttggctggcaaggagattaaaaaaaggcaagaaatccaagagaagtatgaatgacccatattaaatcgcccttggtgaaagaaaattcttggaatactaaaaatcatgagatcctttaaatccttccatgaaacgttttgtgtggtggcacctcctacgtcaaacatgaagtgtgtttccttcagtgcatctgggaagatttctacctgaccaacagttccttcagcttccatttcgcccctcatttatccctcaacccccagcccacaggtgtttatacagctcagctttttgtcttttctgaggagaaacaaataagaccataaagggaaaggattcatgtggaatataaagatggctgactttgctctttcttgactcttgttttcagtttcaattcagtgctgtacttgatgacagacacttctaaatgaagtgcaaatttgatacatatgtgaatatggactcagttttcttgcagatcaaatttcacgtcgtcttctgtatactgtggaggtacactcttatagaaagttcaaaaagtctacgctctcctttctttctaactccagtgaagtaatggggtcctgctcaagttgaaagagtcctatttgcactgtagcctcgccgtctgtgaattggaccatcctatttaactggcttcagcctccccaccttcttcagccacctctctttttcagttggctgacttccacacctagcatctcatgagtgccaagcaaaaggagagaagagagaaatagcctgcgctgttttttagtttgggggttttgctgtttccttttatgagacccattcctatttcttatagtcaatgtttcttttatcacgatattattagtaagaaaacatcactgaaatgctagctgcaagtgacatctctttgatgtcatatggaagagttaaaacaggtggagaaattccttgattcacaatgaaatgctctcctttcccctgcccccagaccttttatccacttacctagattctacatattctttaaatttcatctcaggcctccctcaaccccaccacttcttttataactagtcctttactaatccaacccatgatgagctcctcttcctggcttcttactgaaaggttaccctgtaacatgcaattttgcatttgaataaagcctgctttttaagtgttaa

SEQ ID NO: 215 - protein, 385 aa, Homo sapiens; identical to SEQ ID NO: 213

SEQ ID NO: 216 - DNA, 2040 bp, Homo sapiens
aggaggaaggggagggaaaaggggaggaggaggaggatgtgagactgggttagagaaatgaaagaaagcaaggctttctgttgacattcagtgcagtctacctgcagcacagcacactccctttgggcaaggacctgagacccttgtgctaagtcaagaggctcaatgggctgcagaagaactagagaaggaccaagcaaagccatgatatttccatggaaatgtcagagcacccagagggacttatggaacatcttcaagttgtgggggtggacaatgctctgttgtgatttcctggcacatcatggaaccgactgctggacttaccattattctgaaaaacccatgaactggcaaagggctagaagattctgccgagacaattacacagatttagttgccatacaaaacaaggcggaaattgagtatctggagaagactctgcctttcagtcgttcttactactggataggaatccggaagataggaggaatatggacgtgggtgggaaccaacaaatctcttactgaagaagcagagaactggggagatggtgagcccaacaacaagaagaacaaggaggactgcgtggagatctatatcaagagaaacaaagatgcaggcaaatggaacgatgacgcctgccacaaactaaaggcagccctctgttacacagcttcttgccagccctggtcatgcagtggccatggagaatgtgtagaaatcatcaataattacacctgcaactgtgatgtggggtactatgggccccagtgtcagtttgtgattcagtgtgagcctttggaggccccagagctgggtaccatggactgtactcaccctttgggaaacttcagcttcagctcacagtgtgccttcagctgctctgaaggaacaaacttaactgggattgaagaaaccacctgtggaccatttggaaactggtcatctccagaaccaacctgtcaagtgattcagtgtgagcctctatcagcaccagatttggggatcatgaactgtagccatcccctggccagcttcagctttacctctgcatgtaccttcatctgctcagaaggaactgagttaattgggaagaagaaaaccatttgtgaatcatctggaatctggtcaaatcctagtccaatatgtcaaaaattggacaaaagtttctcaatgattaaggagggtgattataaccccctcttcattccagtggcagtcatggttactgcattctctggtttcaattcagtgctgtacttgatgacagacacttctaaatgaagtgcaaatttgatacatatgtgaatatggactcagttttcttgcagatcaaatttcacgtcgtcttctgtatactgtggaggtacactcttatagaaagttcaaaaagtctacgctctcctttctttctaactccagtgaagtaatggggtcctgctcaagttgaaagagtcctatttgcactgtagcctcgccgtctgtgaattggaccatcctatttaactggcttcagcctccccaccttcttcagccacctctctttttcagttggctgacttccacacctagcatctcatgagtgccaagcaaaaggagagaagagagaaatagcctgcgctgttttttagtttgggggttttgctgtttccttttatgagacccattcctatttcttatagtcaatgtttcttttatcacgatattattagtaagaaaacatcactgaaatgctagctgcaagtgacatctctttgatgtcatatggaagagttaaaacaggtggagaaattccttgattcacaatgaaatgctctcctttcccctgcccccagaccttttatccacttacctagattctacatattctttaaatttcatctcaggcctccctcaaccccaccacttcttttataactagtcctttactaatccaacccatgatgagctcctcttcctggcttcttactgaaaggttaccctgtaacatgcaattttgcatttgaataaagcctgctttttaagtgttaactagtt

SEQ ID NO: 217 - protein, 373 aa, Homo sapiens
MGCRRTREGPSKAMIFPWKCQSTQRDLWNIFKLWGWTMLCCDFLAHHGTDCWTYHYSEKPMNWQRARRFCRDNYTDLVAIQNKAEIEYLEKTLPFSRSYYWIGIRKIGGIWTWVGTNKSLTEEAENWGDGEPNNKKNKEDCVEIYIKRNKDAGKWNDDACHKLKAALCYTASCQPWSCSGHGECVEIINNYTCNCDVGYYGPQCQFVIQCEPLEAPELGTMDCTHPLGNFSFSSQCAFSCSEGTNLTGIEETTCGPFGNWSSPEPTCQVIQCEPLSAPDLGIMNCSHPLASFSFTSACTFICSEGTELIGKKKTICESSGIWSNPSPICQKLDKSFSMIKEGDYNPLFIPVAVMVTAFSGFNSVLYLMTDTSK

SEQ ID NO: 218 - DNA, 2448 bp, Homo sapiens
aggaggaaggggagggaaaaggggaggaggaggaggatgtgagactgggttagagaaatgaaagaaagcaaggctttctgttgacattcagtgcagtctacctgcagcacagcacactccctttgggcaaggacctgagacccttgtgctaagtcaagaggctcaatgggctgcagaagaactagagaaggaccaagcaaagccatgatatttccatggaaatgtcagagcacccagagggacttatggaacatcttcaagttgtgggggtggacaatgctctgttgtgatttcctggcacatcatggaaccgactgctggacttaccattattctgaaaaacccatgaactggcaaagggctagaagattctgccgagacaattacacagatttagttgccatacaaaacaaggcggaaattgagtatctggagaagactctgcctttcagtcgttcttactactggataggaatccggaagataggaggaatatggacgtgggtgggaaccaacaaatctcttactgaagaagcagagaactggggagatggtgagcccaacaacaagaagaacaaggaggactgcgtggagatctatatcaagagaaacaaagatgcaggcaaatggaacgatgacgcctgccacaaactaaaggcagccctctgttacacagcttcttgccagccctggtcatgcagtggccatggagaatgtgtagaaatcatcaataattacacctgcaactgtgatgtggggtactatgggccccagtgtcagtttgtgattcagtgtgagcctttggaggccccagagctgggtaccatggactgtactcaccctttgggaaacttcagcttcagctcacagtgtgccttcagctgctctgaaggaacaaacttaactgggattgaagaaaccacctgtggaccatttggaaactggtcatctccagaaccaacctgtcaagtgattcagtgtgagcctctatcagcaccagatttggggatcatgaactgtagccatcccctggccagcttcagctttacctctgcatgtaccttcatctgctcagaaggaactgagttaattgggaagaagaaaaccatttgtgaatcatctggaatctggtcaaatcctagtccaatatgtcaaaaattggacaaaagtttctcaatgattaaggagggtgattataaccccctcttcattccagtggcagtcatggttactgcattctctgggttggcatttatcatttggctggcaaggagattaaaaaaaggtatgtgagtttaacttcacatgaaaatatgaatgacccatattaaatcgcccttggtgaaagaaaattcttggaatactaaaaatcatgagatcctttaaatccttccatgaaacgttttgtgtggtggcacctcctacgtcaaacatgaagtgtgtttccttcagtgcatctgggaagatttctacctgaccaacagttccttcagcttccatttcgcccctcatttatccctcaacccccagcccacaggtgtttatacagctcagctttttgtcttttctgaggagaaacaaataagaccataaagggaaaggattcatgtggaatataaagatggctgactttgctctttcttgactcttgttttcagtttcaattcagtgctgtacttgatgacagacacttctaaatgaagtgcaaatttgatacatatgtgaatatggactcagttttcttgcagatcaaatttcacgtcgtcttctgtatactgtggaggtacactcttatagaaagttcaaaaagtctacgctctcctttctttctaactccagtgaagtaatggggtcctgctcaagttgaaagagtcctatttgcactgtagcctcgccgtctgtgaattggaccatcctatttaactggcttcagcctccccaccttcttcagccacctctctttttcagttggctgacttccacacctagcatctcatgagtgccaagcaaaaggagagaagagagaaatagcctgcgctgttttttagtttgggggttttgctgtttccttttatgagacccattcctatttcttatagtcaatgtttcttttatcacgatattattagtaagaaaacatcactgaaatgctagctgcaagtgacatctctttgatgtcatatggaagagttaaaacaggtggagaaattccttgattcacaatgaaatgctctcctttcccctgcccccagaccttttatccacttacctagattctacatattctttaaatttcatctcaggcctccctcaaccccaccacttcttttataactagtcctttactaatccaacccatgatgagctcctcttcctggcttcttactgaaaggttaccctgtaacatgcaattttgcatttgaataaagcctgctttttaagtgttaa

SEQ ID NO: 219 - protein, 375 aa, Homo sapiens
MGCRRTREGPSKAMIFPWKCQSTQRDLWNIFKLWGWTMLCCDFLAHHGTDCWTYHYSEKPMNWQRARRFCRDNYTDLVAIQNKAEIEYLEKTLPFSRSYYWIGIRKIGGIWTWVGTNKSLTEEAENWGDGEPNNKKNKEDCVEIYIKRNKDAGKWNDDACHKLKAALCYTASCQPWSCSGHGECVEIINNYTCNCDVGYYGPQCQFVIQCEPLEAPELGTMDCTHPLGNFSFSSQCAFSCSEGTNLTGIEETTCGPFGNWSSPEPTCQVIQCEPLSAPDLGIMNCSHPLASFSFTSACTFICSEGTELIGKKKTICESSGIWSNPSPICQKLDKSFSMIKEGDYNPLFIPVAVMVTAFSGLAFIIWLARRLKKGM

SEQ ID NO: 220 - DNA, 48179 bp, Mus musculus
  misc_feature (1)...(48179): n = A,T,C or G
tatagagtgttaggtggaactttgaagagactgtgaaggggatggattttctgaatcagactagataggaaagcctccctgaggacaaatctatatggggaggtggttttggggacagaagagaggaacagaaatccaggcagagaacagaaacatttgtcataactccccctttccagggcctgcggcagtctgtgactgggtctaggaataatcaacgtgagtctccagaatgagtccccccaccccccacatgcaatcctaagagattttttattttgagagtctaagccttgtgtcctgaaatacttccaaacacatcctaaccactagctgggtgaccttgaacagatttccctttaagcatcaatggtctcatttgtaaagttggggtgacgtgttccttgaagaatgtgaaggtgacattcaataaagcaagtataaacgtgtgcatgacagccagacacactaacagaagcgagcaggtgggcgtggtgtgtttggctcaggaagattttcaggcacaaggaagatttgcagggcgtagtagggaagcctgacccaaaacatagggacatggtgctttgaatgcaaattgccctcataggctcatgtgtttgcatgcttgggctgtagctggtggactgtttggggaaggattgggaggtatggccttgttggagatgtgtcatttgggtaggctttgaggttacaaaagaacactctgcttccgagttagtggaaaaagcatctgcccccagggaggccagtttcccatcaagccattgcttctgtctcttgttactgtgactccctacaacctgcatgtccatttgactagactctgatggacttctggtcgaccaagaccacccaggagccagaagatagcagggcataaaagacaacacataaaaatctcccagggcacagtccaggaaaggaaagacatctagaaagcgaagaaaagacagatttttttcatttctgttttagtgactggctttgttctaagcatgttacatggattgtgtcctttgcttctcatgataaaaacaaaagtataggtatgtatgtgtgagtgcataagtatgcatagacacacacagatggagggtgttaaatttctctggcaaagcagtaaaaatgtctctcttgcttagacgaaggcagcctactgacgtagagttaaattatttcggtaggtgttaatattgcagcttttaaagaagctgcggtagaaaataggactcattaatgtgcagtgtgctgagctccaggctgtggacagggacagggacagcaggcaggctgagctattgcctctgctgcagttctcagttctgctccgtcactgcctgcgtgggtggtgtgtgatcaggagacaggtggcctgcttctgagagccacgggaatggctgtactttgaccaacagcagggacactggcagaggagctcttccccattctgccttgtattgggaagaccagaaataatctcaggaaataaacacacactgtagtttgtgctcctagaccttagtgtgcctaacagccaacacaaagctcattaaagaggcaggttcctgggtgccagctgaaggacttcattcagttaagctgatcagggatttagtaatctgtctttcagttacttcttcagggatgcagggttgtctattagttcagtgtaattcttttgagtgaaaatgtggtgggtgtcaagctgataaagacaggaagattctctggtgaccagttaccgtatttaaacccattgatgtaaagcacattgtagaaaggtgttaagggagtaagtagaccaatgcgagaatgtgtacacatagttaaagggtcatgagcgtgggtgtgggtcttagccagatgtgatcagagtactctgcaaacggaaacaacaggagacagaatcgatgatggtatagaaagactggcctccctaggggtgggaggtgagcgcttcttccagtaacttctagccttatccatctcatcttcaggatgatcagaaggccggagtcagtaaatataatatgaattgtctctcccgaagttggaatggaccaccttcgttctctaaaggagatacttaccctgtaataaggtgttacgtcctctgagagacctgacaaatacattggaattgatcatcaaaataaataaataaataaataaataaataaataaataaataaataaatgggagagtgtttttaagatcttttgtactagcggcataggcttgtatgtgaagatctcctcacccactgttctctaactgtaaacatcactgaacctctcaaaacctaagcctatacgtcaactaaatggaaatgatgaaaggtggagtctgtgcccaggaacacaaatatgaactgggatcatattaagccccagggaagaatatatatttcttgtttctctggtgcctgctggattatgtggtgtctatacgtattatataaaatgatgcacacgtgaaaggtactgttattacttcacacgcaattaagcttgagctattataaaggtgacttgaattaggagatttgtcatggaatggcatcacaggagcgctttctggttgtgtactatccctccccaattttcccattcttgaatccagaactctctttgggacattctgttagcatgctcttcattgcgaacttcaagttgcactaggaattgtgatcttgtttgctctatcgaaagtgctatatttaccaaagcagtgatcttcacacatctgtcagtctctggcctccattcatcctcacagatcccagacatgtatttaagagacaaatcacaggagagcttcctgcattgggcatttcagctaacttgacttaatatcactattcactccaacacacattcttgggtagtctaggctccactcctccaggaaaatggcttctccatttctctgctgcttcaggtgctcctgagtgcccctccccaagtcatgctccccctttagtgttcagtccttgccttcatgactgctccccctggaagcttgctctcagacatctccacaatcacactcatccacgtgtctaatggaaccccatagaatgacagaactgtatcatcaagctttgttcattccgtaaaccctgcagttacttctctacacaaagattctctgctgcatgcagagcccaggggttgctcattaccctgatttacttgatgatgccctcaactccggtgtctagtgtttctctgaggtcacaatgccaaccttcatttgtatcaagcattacagtttataatgtctttaaaagactattatttcttattattttattagatatttattttatacatttcaaatgttgtcccctttcctggtttcccctctgaaaacctcgtatcctctcccccctcctcctgctcaccaacccacccacacccatttcctggctctggcattcccctatactgggcatagagtcttcacaggaccaagggcacctttgcccattgataaccgacaaggccatcctctgctacatatgcagctggagcccacctgtaggaagccacatgtgccattgcagagtggtgctggctatcactggccaccgcnnnnnnnnnnnnnnnnnnnnnnnnnnnnnnnnnnnnnnnnnnnnnnnnnnnnnnnnnnnnnnnnnnnnnnnnnnnnnnnnnnnnnnnnnnnnnnnnnnnnnnnnnnnnnnnnnnnnnnnnnnnnnnnnnnnnnnnnnnnnnnnnnnnnnnnnnnnnnnnnnnnnnnnnnnnnnnnnnnnnnnnnnnnnnnnatattgtggcgttgttcttgctggcaccaggttttggcaccatttgtgaggcctaggagtgacgtgtccatacctgattggttatgctaccagtacctcattaatatgcgtcaggctgggcagtgactcggcaaaaaactcttatgcacatgtgcacattggttgtttacccatattcatgggcgtcggcttaaagaaaccagtgccatcttgtaatggcgtttgcggcttcccaccatgtgtactctttggttggtgatttagtccctgggagctctgggggtactggttagttcatatagttgttcctcctatggggctgctaaccccttcagctccttgggtcctttctctaactccttcattggggacactgtgctcaatcctatggtaggctgtgaggatccacctttgtatttgtcaggtactagtggagcctctccagagacagctacaataggcttttgtcagtaagcactgttggcatccacaaaagtgtctggaattagtgacaatcccattgtatatgtgatgaatccccaggtggggcaatctctggatggtcattccttcagtctctgctccacactttgtctctgtaactccttccatgggtattttgtccctgcttccatgcaggactgaagtatccacactttggtcttccttcttcttgagtttcatgtgatttgtgaattatatcttgggtattgtgagcttctgggctaatatccacttatcagtgagtgtataccatgtgtattcttttgtgattgggttatctcactcaggatgatattttacagtaccatccatttgcctaagaatttcacaaattcgttgtttttaatagctgagtagtactccattgtgtaaatgtaccacattttctgtatccattcctctgttgagggacatctgggttctttccagctcctggctattataaataaggctgtgatgatcgtagtggggcatgtgtttttattacacgttagagcatcttctgggtatatgcccaggagtggtattagtaggtcctcaggtagtattatgtccagttttctgaggaactgccaaactgatttccagagtggttttaccagcttgcaatcccaccagcaaaggagtgttcctctttctccatatccttgccagcatctgctgtcacctgaatttttgatcttagccattctgactgatgtgaggtagaatctcagggttgttttgatttgcatttccctgatgactaaggatgttgaacatttctttaggtgcttatcagccattcagtattcctcagttgagaattctttgtttagctctgagccccactttttattagggtcatttggttctttggtaaaagactattatttaatagaggtctcagaacaatcttttttctttaaacttttagattataattgcatcatttcccctttccttttcctgtctcaaaccctctcatacacacctccttgctctttttcaaattcatagcctgtttttaaaattgttgtgatatcatatatgtgtatatgtgtgtgtgtatatatatatatatatatatatacaaatatgttcctcaatataatctgctcagtcttagcaatgttactcgtatgtatattttcagggctgatcatttggtattggataaccaaccagtgtgctcttctcttagggaagactatttcccccatgctcagcatttcttagttgcttgtgggtctttgtaattcaatgattctcaatcagagatgatttttgtcccccaagagacttttggcaatgtttggaggctcttctggttgttacaatggagacgacaggagtacgtctgaaatcttattgatagaggccaggcatgatgctcaagtgctgcagtattcagaatcctccacagcagagattcactgggtctaaagaatcagtagcagtggagtgggggaaacttgatgctaggtcattaagctttcttacagggattctactctgatagttcccacttggaatccttcttctcttcaggactacatgcagtgtcctatggtcctactgtgacagttgagtacctcgggcaataaaatctcctcactaagagaaccaaactgattatttcaagtctgtacagtgtcctgcgaaaacagaggcaagttaacattgaccttttgaaatgtatttacttttttttatgtgcattgatgttttttctgaatgcatgtctgtgtgaggatgttagatcttggagttacagatagttgtgagctgccatgtgggtgctgagatttgaacccaggtcctctggaagaacagtcagtgcttttaaccactgagccatctctccagccccaccattgacttttttaaaagctttgattgtctcagccccaaattgtttaccttctaactgtttgaagagtaactggtctaccacatagaaagcaggtttcaagcgcatagttgttttaccttattctgcatcttccagtaatttctcagcatcatttctcacaattctctcattgcctctagtatgtgcattttacacctcgttggaagctgctgggactaagtccagatgcttgaatggtgggttccacaacagaaaagcaatggatcatgcaaaagtaactgtcagatcggtgtgaattcaggccccaaaaatgtattacctaagcacttgtgggtttccacagcttctataactcaggcaatgacaagtgctggcgaggagatggaggaattggagccatcatctgatgctgctagggatgtaaaatgatgcagctgctttggaaggcatcctagtagttcctcatcaggttaaacataacgttaccattagctcagcataagagtggaaacagccgggtgtcacccttatgaatggttaaacaaaactcatatattcacacagtggaatcaggaaggaagtacaaatacatgccataacttggatgaacattcaacataaaccaggttaaagaatttggtcatgaaccatcacattttgaatgattccattaatatatccagagtagaaaaattcatagaaatagaaggagattatttgttgccttgggctgaagagttgaggagaaacagtgaccacgaactggttgaggatatcttgatgactaattgaaatggcctcaaactgattgtcaagatggttataaaactctttgactatatactgtcagtgtgtgatataccttaactggtggtgtacaaattagatctccataaagctactgataaataagaaataaagaaaaagaaggaagagaaagagaagccaaagaaaagacttgtgtagtctcttgattatcccttggctgcatttcttcaaagcctcccaagttattaggaatgtgaaggagtgaagcctcatctctctccttgccttagtaagaactaagaacccgatctttagttctggttataaattaaattatctttaggcagattaacaagagacgaggcatacaagttttactaactttatgtgtctgggaaatttccacaagacagtgaagtctgaaaaaaaaaaagtccaaagcaagactcttttctactttgtaaacaaagagtaataaatcttagggtagaggctagacataagagaatgactaaacacagggaaaacagtggagagcaaatatacggaagaattcaatgaagcaaggcttgtctgcagtcccgactggcacctggctctgagctgataaagctagcatcagttaggaatgattaatgccctgtcattaggcagaaatgagaaaagcagaaagtttctctgtgttggaatatttttaaggccaataaacatcaatgttttgggttcctttggcttccaggagaaatatcctctagtagtggtgagctccagctttggagttacgatgactgagtgggattagataggcttccggattactctcttctcccaccagtgtggatcccagaacttgggtgcagtatgaggactctcccttcagcatgcatcagaccttctgggggcttctcaaactatacttggctgtattccactgacagagtgtctgaggcagggggattgagtgagcagagagagagtctacattcttaacaagtttcttggtaacaaccatgctgctggtcgtagaagaacaatctgagataatatttagccccctaggcttgtagacatactttgcaaacaacacagaaatccatagtttaaattagttatgtatgttaacataaaatgctttataaatattttatttgtaatgtccaaatgttgatctaaaaacataactgcagttttgataaaatgataagaaggattgaatcatggaatcaaaagacccaacccatacatctctagctctagtaattgaggtaaagaatttttcagactataacatactcaatagtgaaaaattaataatggttcctcagtatagatcatggggttataaaggaaatgtatgataacctacctgaaaacacattgcaaatcctaaatgcacttctcctttggctcttcttcttcttctgtctgttctgacctattctggtttttatttatttatttgtttatttatttattattattatttagattcttatttgtatccttataagtgagagaaagatgtggtgtagacttgggtgggcggggaaatgggaagaatctgggaggagttggagaatcataatcatactatgttatattttaaaaatctactataaatataagataaatgcaaattaaaaagagatactccaagtgattcaaaatgctagaataggtaagacatttttaaaaatgtgttccataccaaaactctaatgaaaaaatttctcaaaatcattagccaggagacaaaaatattcatgccaaactgccgctatacacctattaaaatgaccaaaatgtaaaagaaaggataattttctggtgccatagcacagacagcttcttttaaagtttgacagactcttacatagcaacctggaaatcagtcatgagtatttactgaagcaaaatgaagaagaagctttatacgaaaacctctgtgcacttatagaaattttattcgtaagcacttatgcatagttatatataaatttttacaaatgagatattccacacgtgcttcagatgataccattgaacaggacacccatactgtggaacccttctcagcaattacaagaggtcagtgactggcagcacagtcgagtctcaaaagcaggggtaacagagactgacccgtgtggtgtgaccccagttattaacaatctggaacaggcaaaactgtagagacgaacatccgattgttgggtagcagaactaggtatcgggaacaaagaggatgcagagggctatgaggaggtgctctggactatccagtctactctatagcatgatttcagagctgcctgcaggactgtatgctacacagttgaaaagctggcctttattttatacacttcacctcaacaaacagaaaagtcaatgtaaagtttgaaagtgccagctgaaaaaacttaccattcatttgagcttaaccagttccatacttaagccagagctgaagggaccactttcagcagctcaggcagatgctgaagcagagataacgccccgctgctctctccatggaccaatagcacttctacctgaacgttagacattttaacagtagacctgaagacagatcatctgcttctacccccaattaaaagacggactaagaacataaaaagaatccaggcacctaggtttgcagaaatctaaaggttgagttcctttaacttatcaacgtttgtgttttgaaatctccgcctggatttccgtataattctagagagctaagcaggagaacagctaccagatacctggtttgctagtaagaaggggcgtggcagaggggcagcatgccgagagatgagggaaggataggtaggcaattgagggggtctttctcaggtgtttctgagcagagtggagcagctgcctctggtccctctccgtgaagtgattctctggggagatttccttgatttacatgttccttgcatgttcatagaattccaccttaaaacaagctggacgcaagcaaggccagtttctcagcgtggaaaagcttttgcttgagcaatgacacactgcagttggatccagttcacccacatctgggaaccacatgtcagcggcagctgtataaagtcagcccagcaaactgagggtgacattttttttgccagaagccgggcagtatggacctcactcttctgtgggttcttctgccactggtgaccacagcctggggccagtatggtggctacgggtacccataccagcagtaccaggactacggtgatgatggatgggtgaatcttaaccgccaaggcttcagctaccagtgtccccacgggcaagtggtggtagctgtgaggagcatctttagcaagaaggaaggctctgacagacaatggaactatgcctgcatgcctacaccccaaagcctgggggagcccactgagtgctggtgggaggagatcaacagggccggcatggaatggtaagaagcagagagtgctctagagatgggaacatctgtgtatgtactgcatgggagaagtttggtccttaaaatagcagggctcataacctgggcacatcctaaacttgctattgcatgctctggcgggcaggtgtgtacaatgtagataacattgtaaggtgaaaaaccaggatggggtatgtcccatgaaggatggatctggttctactccttcaaaggccatccctaggctcagtgtgtcccgcaagctgggtgtgtgtacgcagaatgcttaccagacttccaaaatagagatgtcttaaggaatttatagaaagtgggcatccctgtgacatgggaataacacttccattttgggatgatttaccgttttccaaaaatactgctccagggtggttgggacaaaataaacaattgggtcctcagtatccatatcctgaaaaaaaaatattgattcaaagtaagtgattgggtaaacaagactgagaactagaaacaaagggtcctgaagttaagtagtgctctgctgttctgatgaaatatgttctggcgagttttactactgagatttctctgtctccctctctctccctttctcttgaatttaaatagcctctgttgctaggatatagtttaccaaaggtttttagaggtactgtcctgacttctgccttttgcctaatcattggaactgcattggtcccagtttgtgcttctctgtggtgtttgactatcccagccctggcatttgctcagaagcccatcttaagagacaggggtggctatactggtcattcatagctgtccaaatggagcccaaatttcagggcttagggagatggtggaggctgaccctaggagaggcagactgagggaggaggtagcccagctggaaggctgccaggtgtgccctctgctgaacaagacaactgcatgaggggctcctgcagggcactggcagagtgagcatctgggatggatcaacataaaacattagtggtgatactttcagccatccaggagaaatgccctgagcatacatcacaccacacactacattatctgatctgatctaatgctttaagcaagcctataaatcatgctgtaggttggcaaactgtggtctggagataggtgggtttccttagctagaaagacaagatttggatccagaaagtctgagctacagcggtgggcttccaagagcctgctgcctccaccctaagtggactcctgttgacagagccagggccccagaaccacactcaagctgagagaaggtgggaactacagggactggcccagtgtggtaagtggcagtttgattagagctctgctcctgaggacagggcctatctacccgtgttataggcagcattataggaacagaagcagactgaagaatctgtagaggcctcttgagcagggctgttaggccatccttctccattccctctgcttctgccaaacagatccaaacccccttcagacacagatgactcagagaccaaacttgtcttgaggacagaggacagaccctggtgagtcccagcaggcaggctcattgcctggcttcaagggtagaaatgacctagttgtaactgcctgtccagtccacccaccccaagggaccatcacatagacgggccagctttctaacctcttgaaagagccacagaaggacagcactgggtgaagattgcctaacccctaactgggggcagggcaggggggagccctggggtgagtcacaagctgggttttggttctggtgctaatgataaaatgtaatgggaccttaggccaagcttcagctgtctccctgctgctgcctttggaagatgaaccctcaggctttgcagtctctacacaaagcagccactcacttcagcgtgcgcttggcttttgcttgcattctcttgaactgtgtgttcacccagctaaggaaagaagccaaatgctatttagtctgaaacatgcctgtttgtagctggttaccatgaactcccaaagttgaagagaggggggggaaaggaaaaaaaggaaaaacgtgatttttttttttttttgatatatgggatctaagattttcactttcctccttttgaccttcccatggtccattgcctcctccatctccaccattcacagggctagaaagtcatgaacccacaaaacagcttcttcaccaccagacccagctgccccagaactggtacccaattactccctaggcatttttctcctagatgattatggctttgtgttcagactccagtctcagtgaaaaatttggaaggcaagaaattgttcacaggctggggagcaattacgtctccccgactggctgcctgttcttaatctgttctggggaggagttgttgacgagttttctgcaatttggctgtcttgtgtaagtaaattagctttcaggtttattttaagaggcaggagggacaaacacaaacttgataatacaaagaatctgctgaagaaaacttgctaatggggagccatcttttccgggtacagccattagtgcagagagagtgctgttactcatggtgtctatgctgaaaaacatgttttcaaataaagtttcgagtaaagcggggtgcctggttccaccattgaaattctggtcccctgtgcatatgcacgcctcctcagggacaggtctgccgtgctctcagaggatccctctgactttgattagcaaataccatgggatacacaagtcttttgtggagcaagatgaaactggacattgtagtaactcggaactgccttatggcggaaggttctctgagctaggattcttcacacagcccagctggactgtcttaggttctcaattccttctagagggcagggtatgggagagaagaaatgagagaagtaaaacagaaataaaaaatcatgatgcttctaggagaagaagggaattctaaaacaaatctacatctaaaacaaacatttggcactttaacatcttatttaaaggcagtcaataatgtggggagccgccctcacatttgccattataagatggcgctggcagctgtgttctaagtggtaaacataatctgcacacgtgcaggggcagttttcccgccatgtgttctgcctttcccgtgatgacaactgagccgatgggctgcagccaatcagggagtaatacgtcctaggcggaggataattctccttaaaagggacggggttttgccattctttctctctctcttgttcttgctttttctctctcttctcttgctttcttgttcttgttccttttctctctcttgctcttgctttcttgttcttgttctttttctctttcttgctcttgttcttcttcttgctctctctctcttgctctggctcttgcactctagcgctcttgcgctctggctcctaaagatgtaagcaatagagctcttgctctcttgcactcttgctcctgaagatgtaagcaataaagttttgccgcagaagattccagtttgttgcgttcttcctggccggtcgagagagaacgcgtgtaagacaataatgacttagtggatatggaacttgacaaaacttactttgggcaaaccaggcttcttcaaggcatgtatttgggaggaagactgttctatgtgttcgcaccatttctagtccctgtactccagagaatctgcaaaggcattttaaaagcatctgttttattagagcttagattttgaattaattaatccatgacaatgcattgctcatatctttgaacttttgtacttccacatttataagatgaagtccaatatttcattttggcttactgtatccaccaccatgcatggtagggaacttttaagtttctttaagcatctctaaaacatgtccagagcctggctgacccacattgttaccacgagatggacttgttattgtatttacattctcctatacttttaatgtttcagtaaactaaaatatttcatagcgaattctttgtttcaaaaggcataaggagtaaatgttacataatgtcttggcttgagtcctaggccaataaaagaacattaatgggaaaacgtgtaaatcataataatttctcaagcttgggctgctgctaatgtcatcgagtgtttagaaacacacccgagtttcaggacacagcaccgtggaagctgggtgaaggacagacgtgaatcttacgccatttttaaacctaaagttattcctaagttgaaaggtgaaaattaagaattcgggctgtcgatttgcatgatgggaaattcaaagacaaacagaatgtcacagtattcactaccccaagcctagaaggggccttgcagagaatataggccaatcttcttacaacacaggttagaaacgaaagcccaggaactgaaaagtcactgaaaccatcatagtaagtaaagagtagatgacccaggccctaacttacgtggcgtttggatgctttgtagcctttgccatttgtacatgtatttgctcaatctgtggattttactataaactttgctagactatgataatatgaagattaataacacagacctacacccttgagttactcacagcccaatcttattcactacagtactgggaggaagatattcagtctctttgttttcctaatgtgggagcatggctctaagcattatcagtgcctactgaaggtcagtgatggagaaacagtcaagacttgtgctctataccacaaatgggtatgaggtttaaacacacacacacacacacacacacacacacacacatacccatccatatccatactgagtgctgagctaaaatgaattccatgtacgaatttcttctgagaacaaagctgagtgtgggaaacaaggttgtggcagactgaggatttgggccaacttcccatctaggttattttcctaagtactggaaatcaattgtctaggggaacttgatacttttcttctctttaaagaaagtccgatgataaaatttactcttcccagtgtgggatttgcctctgtctggtatctgctgatgtcagctttccaatcaataaaagacttccagagagctggaaaccttagtctgtgccggtatgtgtgcacctgtatgtgtgtgtgtgcatgtgtgcatgtgtgcctgtgtgtgtgtatgtgtgtgcacaagtgcatgcatgcctgtgtgtgtatgtatgtgtttgtgtttcaaggtttcgaactttacccttaagaggactaattccccacaacacaatcctgtagctctcatgtcctctgtttctatgtcaacagaaatgtgtcctagaaaatattataaaatgttaaaggatgtcaggcattgaggcactcaactttaatcccagaactcaggaggcagaggcaggtggatctctgtgagttcaaggactgtctggtctacaaagagagtttcaggacatttcatacaaagaaacccagccttgaaaaaccaaacaaaaattttaaaggatatctgtgtcttcttaggtaagttacctaacatctctaaagccccatttcatgtataaagcagggaagatcatgctagcaatttttgcccatttcatagaattgttttgatgattaaaatgactaaacagataccatatttaacagaatactcaaccatgtaactccttgtgaaggtttgttcatgatcactgttagggacacttggttctctgagacaagccacacctagctagtaagtttcaaaatggaagtggcaggatacatggacttttggaatatataattcagttagaatctatgaatatgaaatgtacaatttcaagcatcttgaatacttgccacaacttaatagatactgagctggcattatgccaacaggttataaagtagtttaataacttttgattatgagccctccacccttaagcctgcttgctgtcttttcatagtctgaaagtttaggtttaaaaggacatatcacaaaacaagcgggatctcctccaatgccctttgaatagtcgctactgactgcttttctacagtacatctttctgcctgacaggtcatttctgcttaattcttggtagacagtccagcagctctagaacatggagtctggtgacagaactcatatctaggaacagcaagaacagagcagcctgcgtacagctgaacgttattttaaaagaccgttcatgcccccatcattggggcaggaaaataagtgatgcagtatttatcttcaaaaagcttgtcttgtcacactgggggtgggtgggcagccagatgaagactagttgaaatgaaatgtgtgcatcgatacatcccaaggaagaaaaacatcaatctgagtcagaaagtgtgagacttattagggagtagagactgggactgcatcttaacctctgaaactggacgcattgttgggggagttcagtactaacgattcttcatggaggacccaaggattataggggcttcttaaatccataaataataagttttaaatggaaaaatccagaaattcagttttttagactaaacatccttatcctgcatcaaggtttatatccctgcctgttacctcaacattaccttaccaggtcactaccatgacccgtctagtcccctgctctgtgctcttccatcatcagtctcactttgcttctttttaaaatgtctgcactgtcagaggacctgcttgtcagtacctgaaccccaagaagaagaccaggctcagtacagagcagactttaactttaatactttttgaaatatttaatgggtaccctaaatttctgtggattatgttttaaatggttaatggtaactaaagaattattccaggaagaatagaattaaacacctaaagtttgattctatgttacaattatccactacaaggaatggaagaaaatttggaaaagttcaaaaggctgtgtcacatggttccttcaattcagggagttggccactggtatgaaacatgggcaaaactactcttattccatgccagccatggcactggagacaagctaacagcccttaaaatatgtgtgttatgaagtgagacaaaactaacccaaccagatcttccaatttagaaattttttgagagctactgaccaagatggtgctgtggcctttgcttttatacccaactcaatcctagtttcagttcattgatatcttgggttttccatacatttgaacatgggctagcagagatcagagttggtgggctaaaactccacaaaccacttaaaaagaaaaaagaaaaagaaaacctgccctccccctcctcctccctccccctcccctccctcccctctctttcttcctcctacctctgactggtgtcattcgttcttccagtctgaccatcccagactcggtgaagctcacatataagggacagtctagctgaggagctgttgggagcagatggacagcaatgccatttttgtttgtttatttgtttgttgtttgttccgtacctccttgaagggaagtgtgcataaacgttttggtaaaaaaacaagtcgcagatccttttctagttagtgactggcttggctactctcattcaggtgtcacttcattgagtcctcaccaggtctatgaggacccacggagcacattcatgtcaaggtggaaaggagactccctgcctgcggattcctcagaatgaggtcctcccatgatctattatttccattttaccattgcagacagaggggtccattttctgtctctgcttctaaggtggtgaccttgagataaatcgttttcagaaaggccattttcctcagaacacgggagcaaatgttgttgtcacgggaagagtaatagcctcaagccttcccttccagaaaactcccagcctttggcggcgtggaactgatatcgctcttgtgtttgaagctgaaattgaatagcaaagagataatgaaaaaaaatgggaggggactctctgaagcagagcacctggccctcgtgtgccaagggaacattttcttggagtctgatgaggagtcgggctcatgccacaactcatcagtaaagctacagccttggagctgacacggtattcggcagaccattcaaaagcaacaagccagtgctgtgaagtgtcccagagcctcgacatgcccttgtaccgttgtttgttttctttggttgagctgaaatgtgtggatcaatgcagaaccttcccgctccctccctcagcctcatcagctgccctcatccattctcacctccttgaaccagggcctgtaattctgaattctgcagctctactcaatgttcacataagctttgttatctaagaggttatttcgaaggcgactgagggtataaacagggcatgcgagtactgcatgaagcagtacccatttggcaccttcatcctccaaaaggactgctcctgcagcagacgttggaaacaggaagattaaccactgctccagtttccataggaacaacctaggaagagttccagagcctttcaaaggctcaaatgataggcccttacaagttaagtctacctccaatagcaggagacagctggtcagtcatttgctcattcattctatcaaacatttacgggacaagcctcaggcattacgacgaggaatccaaaataaaaattaaatggtcttttcccacaaggcctgtactatctgcctggggtgatgagagatagcagagcatctgtgtacagagtggccgaggcatcctctctccgtgagtttcatcctaggggcacaacagctcagaacacgtatacaatgcttcagtgacactcagcatgggactggctctcacaaagtagactccaactggttgtgtagactacaccaaagtataatcacagtaggtgatttacacagccccaaaacaccagcattctcagggttttctatgcatcctcttatttggtttttagagaaatacaaatatatattatgtgcattttacagagaagaaacctacatcattagatgatgtggtaactgttctaaatgactcagctaacggtgaggcaccagtctagaagcatagcccacgatagtaatccccgccccgccatgtccgtctttacattgtgaatacataccgctaccaaagtccagttctagaaggaacaattccataccaccaaactcatatcaggctcacattaacaaattatgaaggccatccagctgacactgtagaggaccactgatattcagttacctttctccaaatggtctggagccggggtcatgtagggagcagccactcttcacagggaagctttatttgagggggcttgtgaaaacgacagtactcttcttgcaagggccatgaggctggctggctagcggagcgccagaagggaatttgtggaactcggactgctttcagaactgggcttccatgaaatgagtctgcttaccttcggatattcattttccataagggagttcaccaccatgggaactcttttccttataggaagctgagtacacagaacagaaggatagaagtgtcttggggataaaagcacacccgagatgggagtaaaaaggctctgctttggaggaaagtagttatttaatgaggacaaaacaggaaatctcatagcacaccagtgtgctctgccttctccctctgaagaccttagggtttgcctatgactcttagagcatagactgatttcctcccatccacactgatttggaattgagatgagcagacccacctgagacacaggaggaaagttatttctccatcacactatgacagtcatagtgtaatgccaaatgtataagcccaaagtgacaatacttttgcagttaaaaaaaaaaaaaggctagataatcaaaagccatccatctcaatttacatattgaatttcattattgatcgctgagttctcactccaaacttgttaccactcttgagaacatagttgagtaagcacccagtccatctcttaattcccttttcatcatacatacagtggttaaaacagaatagcagtaaggtataagttgttgatgaatgaatgtatatttaaatacacatatgaatgaatacacacataaatgataaatgaataaaaaggaaagatgcatgagttaatttccaccaatggggggagaaaaaaaatgatacttaagtaaatgccccagtatttcagctcattagattgcctgtaggttttaatttttctcaaaccctattttttaataacattcttgaatgctttcaacccccttccagctcacagaggtagtggaaaagaaaagttattaggatacaggggaagtggacctgcttagaaattgttctttggagcaaatcccatctgccttgtcaggaaatccacagttcagttcatgggtcagcagtggcagctccatccatttgcaaacacttcatgaatataccagcagtctagtttggtagagttggggtagcaaacacgaatcagcaggggtggcacaacctagcagaaacagccaaggcttggctgaatcagcataagtgagcaggaggaaccagggccaccagggatcccaggagttctttgttgtacctctctcaacaaagtggaggtcagcaaagactcgagacccagaagcattgattgcaaagctagctatgcaagcaagtgctctctgtcactgtctgttgagtccaattgatattccctccaaacatcatgtgtcctccaggagtctggcctcaccacatgtcttgcctcagcccatgagtctgttttagcaaaactccacgtgagtctgtaacagcagacatcactctgccaatcagctggagtccaaggaagcagcaagaagccaccagagcaccaccagaagtgttttggtgcatttctctctacagagtcataatagacagagctcagctacacattgtaaggcaaaccaacacttgcacttcattagtgaagaattcttcatcatgcatccttccacgtgcttgctttagcaaaacatccttccacctgtgcctgcttcatgaaaacactccatcacgtgtctgtctgtcccagcaaaacaccatgagacacaactgactttccaaagaacccttaagtttccacttcagtcccccactcagtagtcagtgaagggaacaatcccccttccatactttctagaggcagttttatttgcaaatcaaggttaatctagcagccttcagactatgtaccatcagccacccaccttctgtctcacacgagagaggacagatcgatgtcccaggtacctaagaaaccaaaggatacagaagaagctgaagacctgatttggaggggcttgtactgtagtttgaatctgtttcatgtattataaactaaatccttgaacctgtgtgtggacagcattgagacataagtcctttggaaggtaataggaaacagataagggccccgtgatagaattagtttctctgtaagcagggaaagaaaaaatccaaactggtgtgctgttctgttttaacaacagaaaccggcctggaaaaacttagaaaatatcatgttctacataagacaaggaagctccgaggccaggaaggaaacagtcaacatccaaacagaaaggaccaaaccgtcaggcagtgtgtgggtggggcaaaggcaggaagaggaggagcctcactgttcctcacttagagagatgccttaaagatggaaggggtgggccagcagcaccggtagatgaaagtgaaaattccctcccaaattaggaccaggatggaggacacaccatgaagaaaaaaaattggaaacgataggaaagaaaaggggcctctggaaagagtttgaactcagttggcctgtggattttctgttgtgagtttttccaggttcctggcttatctgtaggttctaggggtaaagttcagagacccaactagaagatgatagaaagattcctggatacgcagacagaatgttgactatgatcctaagcttctcatcaggttcccaaaaccagcactgcatctatctatactttgtgtgccgtgtagggagagagtaaaatattaatttgaagtttaacaactcattacagttcttcgtcagctttctagtttaaattcaagtaaaatgatttatagcatcctcaattgtaaaattcacaaactttctttcatctaagcatacatttatggaaagtcattaggagcagggtctcccaagcttccttccattcaaagttactgagacattggaacctttatggcacacatgtaatttctacaatgcaacagctactctttgtatcaaatagaataacttgtgggagtgtgggtcaaagagcatattaactgtgtcaagagggtctgaggaagaggtctgcattcatcagtgctctgatgccttcttctcttcaggtaccagaagtgctccaacaatggattggtggcggggttccagagccgctacttcgaatcagtgctggatcgtgagtggcaattttactgctgccgctatagcaagaggtgtccatattcctgctggtgagtctggtaactaaatcttactccttagagctcctgggggtgggggtgggggaacctacaatgatctgttccttcaaataagcccaggatgtcacaaaccagtgtgataagcagcagctagacaatagaagagaaggaatggctgagggagaccattcatactggaaaaagccctacaggtcatccaacccaatgtccctgtatacttctttgccatgcaaaaataaacagaataatgcctagtggctcctgtccccaagcctgttccctctgtcatgatgatgaccttgcctcacatccaagtctgtttgggacctgtatccctgcagcacttccaggagtgaccaagtctcttctggaccacattctgataaagagttggagacaggaagcaaagcaacaatcacagcaacagcaaaacagcactggtgttttctgagttgcttggcagccccagcctgggatgtcctatttctctgtctctccctgggatgaagcccagtgctccctgactctggcttccaatcttctatgagatgacacacacacatttagtcaccctgataactcacaccagttaaccgcacaacttatcccaaattctttggcctccaaacaacccaggcttttaagccttggatagttatccaaaatcaacatttgaagcttggctcattcaagggcttcgtctctccatagtctgatgtttgggaggagagccttgcagtttctgttctctgtaatcatggtgttactccacagatgtgccagtggtgcacaaagtctctagagtccaatagttcttcttgcagcagtgacagtaaattcacagctcaaagtcagctgaagtctgaagctacatgccagaaaaaaacctcctctagcttcaccaaaactgcttcttaccctaccatgactggtgagcaggtacaccaagggctgatgattgagaccaagcagatccagaatcaaagaccaaagatctgcatgctatgttgggcccaaggaatgctggtacaggcaagggcatcctgaatctcaggctccgtgccattttttactgtgacctctttcctcgttgtcccctctataacgtccctggaaaggcacctttacttctctgaaaacctcaatgcatcattggaaatgatggcaaggtttatttactgtgtttccataaaaaaagtctgatgaaaactgcagtttgcagtctgtaaggatgagaacaacacactattacattctgtgtatggatacctctttctacccagactttgaatacctggtataggaaaactcattgatctttgcataaccaatgattgtctagcacagtgtttgggtcttatatgtctgtgtgtgcacccatatgcatgacagagagacagacagacagacagacagacagacagacagactaggctgaagtttcttgttttcttgcgttaccaggaatccgtcattctaggcaagtgttctttctagggctgtaccatagtcccagtcataagtggttcattaataggaagagaattcttttttgtttttttgttagaaaaaaaccataggttgttgttttaaacttaaatagatttttaactcttcattcctaccctccctcctctgcgttataagctctgagctcacagagatcttggtacttatgtatgccaagccctttaaaaagaatttttatatatttttctctgagtgtgtgtgtgtttgtgtgtggatgaacatgtgttcagatgtgtgcacacatatgtgtggatgttagatgtctacctgggatatagccccttaggcgacatctttctgggagacatctctctgaaagagtctctttctgggacttggatcttgctgttctaggttagattggctgaccagtgggcctcagataccctcctatcttggattccccagggctggtgatcactagtgggatcaccatgctctgattttgacacaagtgctgtagatcaaacccttcatgcttatgcagtaagccctttacagactgatctctctccccatgtcccaagaccctttggtgacatcagatacacagcagacactcccatttgttcaattaatgaaggctttagcctacgccctagctttctagtgagggttaaatgtgataacaggatcctggctttgccatgggctatgatcacacaaagctgggttgttttcaaagcagagtcccttccactttcctcaatgcagaagagaccttctatcctaataagcctttcaagggcagaaacacccaacaaggccaagcattgccttgcagaaaacagaacatgtgacaggagttggatgtgcagaggaacaggggtgagccaggggtgcaccgaatcgtgctcacccagggagagaaagaggattctgggacagacacatttgccatcacagtaagagcctagggtctctgccaggatgaataagagagcccacagtgtctgcagacagatcatcatgcctgctgcctggggttctgggcaaacagaactacagggaatgggcttggggcccaaagctttcagctgccaggcagataaatgcccaagaaaatcttactgacaacagaggctgaacatgacaaaggcagaagcgtctaaattttctgtaatccttgtcttctaattgagcaaccaatgaaatgatgcatattctgcattattgtgtgtcaacacttggagcgttgatgcttgaaacttaccctgtttatggccggatacagataaatcactgtgtaccaaattctactacccatctaaggatgccccagactccagcggtcatctgccttgcttccccacaaatattacatgtcctttctctctttaaaaatgacttccaaagtttccccttagatacagctcatcacttataatactaagaatttaatgactatggaaaggtacagataagggacagagaggatcttggttaatttaacaatggtctaaatgagatgagtaactcttctcgaattgacagaaacattcaggtttcataaaattcacccccgagccttggtcttcagggttcttccacttgccttcctgacccccaatcccttattctccctcatcccacctgggtccagatatatcacaattggtcagagtcactgggcagtgagaatgatatcacaactcaactttgaagcagacgccacaaaatgactgcttcaacgtgattggctatagctcagacagcaccgtgtcagaacctcgtggttctgtggaaatgatacttttctcaaggaaacactggagaagtggcataaacactgtgcaccaaacaccacgcaacacagcatatgactcactgttccaagggtgtctggacattttagtgggatctttaaattgcctgagtcatggtgttatattatacccttctaaattgaatgaagcccccaaggtcatacattttcaattcttcagtatctcagcatactgtctggcccttagtataaaaggtgtcaaaagcgtaactatatgttgctagctcttacgagcagtaattgcagtgaaattaatattgatagagtgagtttttaataaatggtaataataaaaaaacttcttttcaccgtaataaaaataccctgaaaaggtaacttaagggagaaaggatttattttggctcacagttggaggatgcatgtgctcacgtacagaggtcatgaggcaggagcttgaggaggcaactggtcatattgtatctacagccatgaatcagagaatagcaaatgctgtgaccacttggctttttcacttttaaactacttcgtgtatatgcatgcatacctgtggtgattcaatatgcttggcccagggagtggcactattagggggtgtggcttattgtgcttgatccttttaacagccctgcatggtgaatggacagctatgttctaccttccccacactgacatgctgctaagccctgtccttggtaccttctcttacgtcactttagctgacttgaattaaatggtggaactagacacatgaaaggatgaacctttccacctacatgtgtgtgtgtgtgtctgtgtgtgtgtgtgtgtgtgtgtgtgtgtgtctatgtgtgtatctgtgtgtctgtgtgtccaggcaccatggaatcctaaggagaccattagatcccttagatgtagatctataggagattgaaagctaccctatgtgggtgctgagaattgaactttggtcctctgcaggaacagtaggtgctttgaatcactgagacacctccccagtcctgtgtgtttgtctgacacaagttttatatatccttggcttgtctaggactgcctttgtagatcagggattcttcaaactttcagcagacatttcctgtctttgtatcctgagagtgctgggattgcaggcatgctccaatgcagcctccttcccttctacattgaaattctctctgcagcatgcatgagaagcctgtcaagtgaatgtctggcacctctgtattttcgagcatttagagactcagaaataatatcattccgggatagaaaaacaaaatcatcaccaactcccagatgcatgtgggatttatttgtttggtgggagccaaggtgctgttctgatttcagcgtgatatctctctggatatcacaacatcactgaaacctggcaagaaagtaaattcctgctcgatgcaggcatgccatttctaatcggttcccactggactagatgagtatgtaaatgcaacacatatttatttagctggaagaatccaaatttgtagtccaatggtctgttaacagccaacacatgtcaccaaaagggcggcaaacaagactacggagaccttttgcctcttccactgtcctcaaacagctccagctcctccaggtcacatcccagtcagtcggcctgctggatggaagctgcgcatatgcatcctgggaccgaggggtttgaatttaggaacgtgttcgcttctttattgttttgcctaatgatccttctctggatctatgactgatcagtaggtttgtagaatgatctgcttggacacagtcacttgtttaaatgacctttacattgcctttcactgtcactggctttctgtgacactcaaactcagcattctccatcatttcccccctgacttccccatcatgtccagtttataaggcagagagtagcttcgcttaattcctggacattcctagttctcaacaacaaaagtcagttaaagagagcatttgtctcttctcttccactgtgaataatccagtcaaagaaaatctttgtgaaatcgggcacctttgttctgattttaacactagatgaggtttcttggcaagaccattcctgtgatgctgtgtccaagtcaggaatgagctcataggccttccgtcagggagtctgtcagcctgccctggctggctggtctcctgtagcatgtttcccagaggcctgataaaaagaggaactgtacacactgatggctctgagctagcataggagctattattgcagagatggaagctcctatatcttgataaaatgaatctggatgttagtgtttaagagggcacactgcatgtgggtactcctgtttttcacaagcagccaccaccctgccctgtgtacactcattctggagaaccacagctcccctgagcctgcgcagaatcaattgtccctttcctcagctggagcagctgtcacagttactgtcccctatttataatgttggcatctatttgcgcatataggagatactccgttttgtgttcagacttcaaacgcagacacttcaaagatgtgtctgatcgtcagagtatcagctcacccaacctgagccacttagaacaaagcaaacctgtcaatcacagccaagtccacttcaatccacaggactctagaagacatccttcatttctttatccaattagttactaaatgtgaaaggatagaaaatatgtatatttcacagatttaggagaagttctgaaccatggctattatattgatttatttagtgatatcatccttgtgctcgtggagaccatgagatatggaagctgtgatgctcttcaaaagagtgagcttgattcagaaaggtccagccacttctagatcccatgttatgtgtatagtgtacagccacttacctttatcacaggaagaaaataagaatacagatcaagtgttaggcagcaacacagcagacatctaatggcaaagtgaaggaggggggggtgtttgctttatttggagggaaggagaagttggaggtgaaactgtccttgttgatgtacagctcagggtagccaggcttatgactgtcaacagtaatcaaaacaaatgtgaccactgccgaccagccctgggcttgaagcaagagctcgaggctcccttccaaaacagcaatttgaaaaaagttcagggactttcctcttctaatttaagtcacagacatcctgagaactgtgcttccgctgtgtggtgatacatatctgaaccgtttgaaatagaaacccccaaatgccacagaggatagacactaacattttatgttccctctcacagcccaggttcccagaattcagtctgtcgacacagacaagggcactaatgtgactgtagaggacatggcatgtggtcctatttggccaatgcccagctctctgggagggaccaagacacctgcttctttgcccctgtctatttatatttattttttaatgtaagtccatttgggttttgttgtagtaaacatttaacctcaattgagggtttctaccccgtctttgatcattcagttctcagataaaggacacacaacctttatatttatatccccaatgaaggatctagagaaaagacccaaggagctaaggggtttgcagccccataggaggaacaacaatatgaactaaccagtaaccccagagctccctgggactaaaccaccaaccaaagagtatacatggagggactcatggctccagctgcttatgcagcagaggatggccttgttggtcatcaatgggaggagaggcccttggtcccatgaaggcttaatgccccagtgtaggggaatgccaggacaggaaagcggaagtgggtgtgttgatgagcagggcgagtgggaatgggataggaggtttttggaggagaaaccaagaaaggggataacatttgagatataaataaagaagatatctaataaaaatgtaaaaaaataaaagggaaatataaacacacacacacacacacacagagaaaacaagaaagaaaccaaaagcactggagctgggcagatatctaccctatgtgttattatgtctacttccctatcaataaccctgagttattacttgctatattccatctgggctgctcttaagtccaattggccagccctcatggtcatattttcatgactcacctaccccatggtgtcttctctctccaccttcttctctctccccttgtggtcctcctcagacacccagtccaagaattgaagctccaccttcctctctcctgctcagctataggctgtcagcacctttattcaaccaatagttttcaattaagaagcaagttcacatagcattactttgtgtatgtgcagattctctcatccctgggacaacccggccttggaggtcagtatgtggcgtcacaacacctagcaaaagaccaaaaccccaacagtgttttatcattctgtctttgcaaaaatagcttgaacaagtcgtgatgtagtatggattttgcatgtcagaaagttatcatctttgatttacatatacattgtaagccagtcttaacatatcaagcctatgcttgcttagtgtctcttctatgctctgtaaacattagctcataaaatacgtgtatgatgccgtacaccaatgatgcctcaaagacatctccatacccaccagccagtgatgcactcagcaactgttcatccagtctagtggtacctattgacaagatctgtgactcaaaggtcacagatgggaaagtcctgtgtcaatctcccttcggttcaaactgagttttttcatatcctttaagttattcctgtcttatccatccctgtctgtgcaagaacttatacaaatcttaagttttccacttctctacgttttggaacaaaaaattgagacgctgtaccccaacagatactttttgaaagtgttaggaaagtgtacacgcatggatgtggtcacacgcacatgcaaacacacacacacatgtgaatatacataaacacagtggattttttgatgaaaagagcataaatatgccccctatatttctcagaaatactttaaaatacactaatttctttattacactgcccttcttctcctcttgtcaagccgcagacgtacttgtttattttacctgggctagaaatgtgtgccaatgctctgtatgagggactttgccaaaaacctgtctgaaactgcacaatgattcacaggaaagctgaaaccacactgaatcttactcttatctgcatggaagacaatactgtgtgcaataaaacattatcatccagtttccgctgccctctcttgactttctgaaaaagtacataaactttgtctcagttttaaccctgtaagtttaaagccttttattttcttgattaactattactcaggcttttatttattaggacagtgtgtgtgtgcacgcgtgcatgtgtgtatgtgatatcataaagaagtaaataaacatatatctattggactaaaaagatggaatcctagattaaattgaaaagaaattcttgctgcgggtggtgtttggaaggctcttattttattaatgattgagaccgtttctgtttccatatctttagtttccagcctccttcactatttcccctaattcaaggttcgggaagaaagtaagtttgatctcctggttttatgatgaaaactaagcaaaacacaaccaaaaatcaaagttaacactaatttggaccaataccaatggcagacacctcaccttctctgggaaactctagaaagtcactggtcagctgactctgctactgcagagggaaacttcctagaaacctatgcactgagcagaaggctcccatctgctcactaaattaataagaaatcctcaccagagaaaccattaaggaactgtttgcccctctggaacctaagccctttgatgtttattctaagtgcaaatttttctttccggcggaggagactggattgcacactgggaagagcctgagcataggagatgtcagaacccacccccacagtgacacactttctccaacaaggccacacctcctaatagtgccattccccttgggccaagcattcaaacacatgagtctatggagaccaaacctattcaaaccaccacaccatggttccatctacatttagcctcaattagcacaatctggaaaattccctccaaggtgactctagaccctttcaaattaacaatcaatataaacctagtcataatcatttcaattgattttatgctctaataatgagttatgatccagtttgaaacagcaccctggctaacttgaataggatggaaatagttcagcatgacttcaaaggcaggagagtcttctgcctatgttacagctacagttgctgatgctgttgttgtaggtgctaagtggacagtttgatagctagggaaaggaagtggagaaatggaagaaggtatctatcatcatggcttggcagaaaccacctaacttcagttgcgatatcccaagatctcccgctctccttcacactgacctcctgtctgctccaaccctttgttctctctgcacaggatgacaacagagtacccaagccactatggggaagacatggacatgatttcctatgactacgatttttatatgcgaggagcaacaaccactttctctgcagtggaaaggtgagagaggtaacccctgtccagtgatctcagggctggaggctgtgcagattcactccttgctggggtcctgactgtggggtcttttacctgatgaccccgataatctagtttcctacttagtcaaggattagctgtgggtttggttaggcggcgggaaccagtgagaagtgagaattcttgggaacttgcctcacaaggcagtgtgaccttgccaagaaggacagagaccaacctactgaagtaccactgcagccgtgaacttggcatgggcattccttaatgtcctaaacaattcctgcagtcagcctcagacactgcttgcatgccaaggaaaggttgagatggctggaagggcattcgccctcaaactggatccccttctagtcctgtgcctttgtgtgctcctcacttagaactgtaggaaaggaagagaagaaaagaagaggagaggattcacaaggaagaacacacaaaatccattctctcactacattcagtctggtctaatgcaacatttgagactagacaacttataaaagtcagaactctactgtccacagtcccagagacttggaaattcaagttcaaggaagcagaagatatttggcaagggctgatctttgctttgaagacggaccctctcattgtgtctccacacagtggaaaatggtcttactgcttcagtttcttgagggctaggattacaagcatagttggtatacccactaccacctcgggtttccaatctaagcacagtagattgtgaggttcctgcttccctcagcacatgctcatgcttggtgtgcatgcacacttccccgtaagtccatttgaaaagcaggatatttagggttgttagagggaggggagttgccaaagcccatggagctagtaagcaattcaatctcccatgatctcacccctacccttatacaacataagctgttgttacaaaggcactaatacgactcccaaggacagcataattttacataatcagcccccaacccttacctcttagtactacttagttctatgattactttagacactagtttccagcacacagattttataacagacattaacatgcagaccacagcatctaactaatcatatttagaaatgaaaagggaggaaatcattatgtgatgaagtcagaatatttctggagtaaaaagacgacctaagtaactcaagaaggaaaagcactaagttgcacttcggccctgcttctcccctcattcctttctgggcctctcccaaggacactgaaaccataagaaaagaagagtcaaaaaattcctgtagataagatcatcatatggctcttgtgttatctctccattaatccatgaaaaagtatggagaaatgcagaagttaagagatgagttgactagctttcactccatgataataatgtcacacaaaaatgaattctggaagattacccacacatgctttgcaaaccaaataaaaccgaaagccaatcctctaacgggctatgagctggagtcaatttgagtgccatctccttttgtgtatatgcttccaaagaaagttgcatttcacttagctgcagttaacttatttactatgaaacccacattttaaagacataaaaatagctgtggaaaagcacattgtcttttccaggttccatagacaaagattctggtttcttcacagaaggacaccacagttttcatatgtaactggtctctgtttgagattgggttttaacttacttggttaactgctttctaaaagccacagtttagaagaggaggaatactatggataaactcagccaatgaggagaaacaactgagtggtaaagatacttaagacgagaccaacccaagaactcaaagaatatggaaatctaatgtcattgagcaataaagtgtctgccaaagttcaggacacagtgccagtatcaagcattcctaaagattcccggggtaaaggggaaattggtcctgagttttctggttaaaaatataaaacaaagtggaaacattaaagaatgaatgactatcacctaaaattggtgctaaataaatatttttttggcagccaaaatggccaattctagctggcttggaaatgatcagttacataaattgtacagaatcactgaagtctgaggcttagtgtctctaaattattttaaaatgacttctgcctcccccagataaacataaaattagcataaataaaattagcatgctaattaattagttttgattcagtcttcaacaatcagtggtttggaaatccacagttttagtttgttcatttccattgaagatggggtgcttacccccaatcccattggacaaaaaccagctgagcaagagtttcccttctggaacgaaggtcacttgtctatgtccacttgtgtatgggatggtttctcattctggggacagatcattcttccttgcaagggtctgttctatgattctaggtgttagccccacccactaagtgcaactggtatctatctacctacagggtgacaggcaaaactctttgcagccattaccaaatataccatggagtcacttagcccctagatgaaagctactgtctggcatggaaaacagaaccaaggtagaccccccttgattcttttaggaccaagtctaaatttttctcaacttctattaactgcctcttaaacttatatcacagatgcctggccacagggccttccttaccttcttcatgcatagatgcgcatttcttagctgtggtaattaaattcactctcaaaacacactgtaccagtttgttagtcatctaaagcaagccgtatcctctgtgggtgatttttacaagaacaaatatcaatacacatctcattcccccaggcccttaaagacatgtgccggagaacactatccccagtggcactgcataggacacgctagaaaaacagactcagaattagaaagcttgccttgccttgggctatttgctcaccatcccccatcccccaactccaaatagcacagtcatcccacatacttccttcccatccagaaaccagatactggagctgtcagccattggtgtttggtatacactggatcagaaatgagcccagcaggttcaaagagaaggaagaaggactgtactgtggaagaaactgctcagctgaatatggataaagtagttccactctttattgggattatgccaagagcatgacagctgtgtcctctggtggcattaaggacacctggcaagggaagcagcatggtacaagagaaagaccaatatttgagttcagcaccttcgaaatctgacagcatcacctttcactggttggtaatcccttaaagcaagtccgattacactaagcctatttcttcacaaaacaatgagtcacagtggggattactgataggacaggttgtagagcatctagtgcagggttgggcacattggaagcactagggacttcacaatgacaatggtcgctgtcatagttaaatagtatcagaccgcaggagtgctgggcagagtatataactccctgcattcccattaagtggttgaaaacaggacatggtcctaagcttagcaaacagcaggtatctgcaccatgttttccaaaactgaacagttctgtgccctctcaattttatcctatcacttaaataggctattccatttctgataggtgaggcattttcttttcacattttaaggtgccttgagtggtttcccactcaccttagatgtggtttcaaaggggaaacacacagtgcatctcctggagcctggcatatagagagtcctcaggagaaaggaaatattatgggaaattgcattaccttttagaaggaaaatagattcttcaccgtgaaatagaggtagtgctagtaaatgctgaacttgtgagtcctggatgttgagccatggaggactgaccaccagccatagtaaaaccctccatgtgccccattaccagcaacgggcaatccaacctcacagatccatcagttctctggagactttattgaaggtttctgagaacaaggtgagaatctccacagctccgaatcctgccaaagcccatcagtgcttttccccgggagccgctctttctccactcactgacatttccttttctggcgctcctcctacagggatcgccagtggaagttcatcatgtgccggatgactgactacgactgcgaattcgaaaacgtttaggctcgccgcgtacagaagtccgggtgaagggtcagggcccaggtgtcctgagggtgtcatatcacatatgttaatattgattagaacatctacacttctttcttttgctctcttccctgggatgggagctatggtgtcggctgcctaggcctttctcaccacgatcacacatataaataaactcacaattaagccatgtttctccctttcaacacattccaagacaatcatgtctagttgctgatggcagcttccttgcacagcacatgtacagagcctgcatgcttacagcctgccacccggagcacctgtcgcagccttgctgtgattcgcactataacttgagcttcagattcagcttcgtgaacttggagagaaagaaggagcttgagagaggtgggataaaggttctctgtagccaagtctgtttgagtgacagcacctagagacctcacctggggtggtggggggtcactctctgtcttgagggaacacgtctactctctccttccacaaaagccacatagacttagaagttcaagtaaagatctatgtgcttcagaagagaggggacttggaggtgaaagggggaggtgggagggtttgaggactgagctgaaagactttagacagaaagaacgtcctctattcaaagatatacaccagcagacccaacagtgagaatgaatatgagggccaggaaaacctgtgcgaatcagtctcaagacagaaacaatgaaagaaagataagtgaatgagattcacattgggaacctggggagacaagagtggtcagaggagaagagatcttgggttatcagcagcttgagacacacccagtattcatatgaagactgtaatatccctagaagccatagggacgccatctctggattggtcctgaaggataattctccctttcccatggcacttgaaagtgtattctgcagagatgacactgtaatatctctgtctctagccatttgtaccttcttctttaaaaaaaaataaaagtatcaatattcactgtgccataaatatcaaaggtcaatttgtgccccctatgctccccttttgatcattcattaacccattctgaaaatacagcttcacactgtgatttgtgaggaggcttgaagactatcatagtgggagccatgtgagatgattggaggaatcagatcattagaacacaaagttcagagtgctcctgtcaccgaagggtcggacaaaggatggaaccatgtttctctggctttagatctagctctttacctgctatatcacatgacccgatctaacacatgaaattgtagctgtaggaaactcacagctcctttatctgtatcacttgcttattaactgctacccttccttcagcttctccctgaataggcccaggaaaggcactagaagaggaaagccccagtggggacactttgctatataccccagggaaatggtgacatagaacatctcagccaacagtggctgcctttccctcagtaagctcccagctttgggatgggcaagacaaaaccaaagatggcttcctttgtctcaattcttaagaactctttgataacatctgtctgctgagttccgttatttctttgctgctgcttttctgcagttttaatttataaggagaagtttcctggtgttatttttcacagagggtgccattaatattttagcaattgcagcactggggcaggatgacaaccagaaaatggccttagctgggttcatgtggagcccagcaggaagggagacaaaccatgcagactggctcactcagtagccacatccctggcggcaacaaaaaactggtaggaggatgggatgtgggggtgagaggcctgtggctggaggagctgtcaggagactgtgaaaagcacaagtcaaggaaagaacagaaggccatctagtaagaggagaccgtgccagatgaaataaaaggggcttttacaaaaaagaaaaaagtaccctttgtgtgcaagccaaggaccatgacaggaaagacatcttcagcttggtttggttatggatcatttacattttatattatctgtcaatcagcacaagagctgagcctccaagtaaggaacaagttccagacctgacgatgagtcttgggtctcattgctccgttctttctactaaccttctctactgtcttggacacaaaactaacattttctaggccagctgtctaaaatgaagtcatttatttaggtcaatggttctcaatcttcttaatgctctgactctttgatacagttcctcatgttgtggtgacccccaaccataacattatttgcattgctacttcatgaatgataatgtaaatatctgtgatttccagtggccttagatggcccccgggaaaggtctattagactcccaaaagaagatccactgatccaggtgactgttacatttcttgcagctttaaaatcgtctgcactctttcccaaatggttgataatgggattcctgaggcaatctctcctgagtaaacagcctggcactgtgacagaagacctaggccctaccccagaatctggcagaatagagttatacatctccaaacctatgttttcctgtgtccaatgaagaaaaaaaaaatccctttcccaggaacctcacaagatgctgccacttaaagcccagtgaatagcaggagagacaggagattcccacttgacaggacatgtgtgtgctgggaaaacagagtcaaagcaggccagtgaggcagaaaggggaaactggggaagctgagtccagatctggcatcgatgaatgaacagaaatgctatgggctatggatatcagccctgactctgtcagttcccaacatcatcatcttggccaagttagccacctttcttgattctatttctttacccaaagagacaacaatatctccatgatggacttgttatgaaattaaacgcaatcacgtaatgattgacctgtaagaccacagtaaacgcagtacaagtagggaagagtgtgcacacacacagaggtataatttctcagaaaacagggtcttaaaagaaatcatatcaatctttccaatgacaggaaaaccgagtaggacttagatttgtctctcattcattcatttggttagttactgaaacaatgaattattatatgcttattataagccagctgctgaataaggttcccatagtttagactctaaaatattgaggatgatgaacaaaaattgagagaaacagccttgtggtatagtggtgagcatagtcaccttctaagagtcaggaaaacaaataaaactcgatagtacagtttcattcatgatgatgagtgtaaagcaatctatgaacttaaagagaatttcctaaggaatgggcctcgccaacagggtcttggagtttcatcgtatagccctaaagctatgagcaagaactgatagctcttgacaatactataaagcatgccattatttgtgcatgttattgaaatttattatttttcctgaactcttggatatctaaggaaatggacacacacacacactcaagaaacatcacacacttgtatgtgcacaatttctccgtgtgctcccttcatcctgcctcttggtccacacacaattgtctttaggttccacttctttgactcagacataattttgacagaatgaaacagggaggacggtgggggcagggagaaactagaataaagtacgatacatacatatgaaaatgccatgatacccttgtattgtgttccaacctcaaatatcgtgtggtatatatttaaaacgatgtctgtgatggctgagagaagaggtagtcagtcttcctcaagtgtgagccccctgattagcttcccaatactaagtgctgagccctaaacacatatccatacaagcaacactagtggactcattgcagcggattgtatttatatatttatgtgtgtgtatataaatgtaacaataataatttaagaaaaaagaaaacaacagtaataataaaagtagggggacttggagatacaggaaggggaacagagggacagggaacagggtctgctaataggggattgaatgagatcaagtattctatactcgtgcatggaatgtcacaaggtaggtaacttatttgtgcaactttaaaatgctagtaaaggtagaaacagatactgagactcgagctttccttaatgcctccagaagaattacagaaagaagtaaaagaaagtaagagagacttagactactagacatgtctgtcttctgcatacattcttactccagcacctttcctggggcctctctaactccaagcctatagagtctctcctattcaccttacaaaatattgttctgtgaagtccacactgaagtgattattcacatcatggtggtccacagaagagaccaacattcactttctttataaagtctctctcagttttaattaaatcatatcagcttagttttgtttattgaaactgcactgttagggacttgaacctgagtaccttcctggaagtcagtgaggagggggaaggggaggtttttgcagaatctgtgtatactggctaggttttacatcaacttgacccaagctgagggagcctcaattgagaaaatgcctccataagagcaatctgtaaggcattttcttaattagtgattgatggggaaaggcccagtccattgtgggtggggacaactgctggaactggtggtcctgggttctgtaggaaagcagtctgagcaagccaggaagcagcatccctccatggcctctgcctcagctcctgagtaccagcactgagttcaagtcattgtaaggaacgattatcttttcacacacagccatgactgtcatgagacttgaggcttttcacaagcttaaatctgaaaaccaagcaaaacgctattgattgtaaaatgtacctaagagatgccgcggggcttgccaactcttcacaccctccactctgtgggctctttgctcttcttaccttacatacctgtgagctcagttcagtaagttataggaaatgctgaatagaaggtctgcaaaatgcagggctgtgtggctctgtggatgaagggcttatccagcaagtaggaggacaaaagctcagattcctagaacccatggaaatgttgggcaggcatggctgcatacctctaatcccagcacttaggtggcagaaacagacagaggataactggaacaaactaagttagctacagaagctggtatcggaaagatccaaggtcagtaagagaccctgtctcagtgaagtggagaagagctgaagaagacacaaaacacctacttaaggcctccacacacatgtgagcctacccacatgcagacatacatacacacatgcatacacaccatacataaaacaccgaaactgcaaattatgatattccttggaatgtagcaatactgtgttgccgtgatttgtacatagctttcttccttctccagttaaaacaattagcatcatgtttaccatcaaaataagagtaattctaaatcttatgagacaaaagctgttactggctgccgtgcagttcagccctaggccagcgttccggctgaaaggcaaccgaaggcttcacttcatggaaagaatgagattatagaatcccagaccctttcactttaccagctgcctagtgggctgtaatttaagatgcagaattacctgcctcttccaatgtttctcaccatccccagagagagcagcagatgtgctcagcctgtcctttggccagtgagaaacactgtccctcggtctgctggtaacatttaaggtagtaactagaaaccctttctctgcttcacccaagttcaatttctgaggacagactctgactccttataccacttttctataccttacaaatctcaagtccttccctggggctttggtctgctgtccttgccttctcttcatctggagaaggcactgaggagatttcatagaacatacatcctttcacaagataaaaacagccctaccccaactgcaaaccaactgaaaagtcttgataactttaaattgtgccacggaaccctgctaagcacttgactttaccacaagcaacctctttcctcttctaccgcactgtaagcctacacacacagaaggagcctagcaacacgaccactgggaataataacagtcagaacgtgagtctagatcgtttttactgggacgatctatcagtgttctaaacaattttcattgaaaattgaagtctgaacagtcttggccattatgcggttttattaagagacaaggcattgcaggggtactacggttctgggggtccgatgcccatctcttactcccttccagcatcattaagtaatgataatcattcatttttacccctttagaaactaaccactaatgataggtgagttggaaaacatgacagtctctctgtcacacaattggaaagcttatgccactatcctaagtaattgaatgccattttttttaaaaaaatgaattaaaagtcatattgaaatgagcatctgagcagcttttggtggagatgagatcaaacctcactgactaatcccccagtagactgcagaccgagggacgatggggatcaggctgacagatggttgatacacagtgaaaagatgtctgaaattaactggacatgtctgtgtgttagggaaagttggagataatgccacagaagtataaacaagtgtatcaggagactggaggaagggacaggggaacctcaataggattcttgcagagaatggtgtgatactggttctggctggtcttggctggtcttggctggtcttggctggtcttggctggtcctggctggtcctggctggtcctggctggctctgtggagggaaagggatctttttctctgtttattttcttgttatattgtttggtttcacgtgtgtgtgtgtgtgtgtgtgtgtgtgtgtgtgtgtgtgtgtgtgtgtgtgtgtgtggatttctctgctcccacattttgatggctggagttacaggggtgtacctgactcgtagcctggaacttcttacacagagaaaaaaggaaaaatttcccagtcacaaggcactcgaaggcaccattgctacctgtgttctgtatgtccagtgctgttagacacaccacaaacgtggatttatgcaacgttgctaactcaaaggaaatattcatattcgctttacttcacccacttgaaagtgaagtgttgggctaggtgtctgggttctctgagggatctctggctcaaaaccacaaatcaccctacaaccaagcatcagattcaggtaatatctgaggtgtgcttcatggccagagactccagcattatacaagagccacattaatcaatccaccaatgttttgtgtctgtggaactctttgttggcagactcacaggtgagttcgttagccagtaccctgtggagagatgttcttggaagccatacatgccctgtgtcatgcctgtcttccccctccccccacaacaatgtcatgcagattggttccactcacaggcttccaggaggaaggacctggaactctttcacagtgtaaaaacagtatagtctgagctggagaattcacaaggggtaggcaggttctcatgggtgaaccttgagaaaaattcactacaaaggcagagggattaaagaattggaaaatacaggtgaaactgtgcagtcaacccttcccacacggaccctgttctaaactgacaactgaacacgagtgtgccctcgtataacaaatcacagcaagatgtcactcattaatcacttctgtgtctcctggttcaaactgaaagaggccagaaagcacatagcacacttttttatttcttgcagaaaaaaaattttttttaattctaaacaaagggaacaaggagcaaaacccagaaaggttattgaatgacagaaggctctaggccactaagcatgtaggaatgaaacatgggtgactcgtggtgtttcagaggcaggagggtctctacaagctcacggaacaagctcatggacagatgacaacagcccaacgagtgaaggaagaagggccgtgccaggaactgaggtgcttgagcaagctaggggagggagggaacgcttcaagcttgtgaggggaccctcttgcctcctgccgccagctctcaggtggaagacaagtgggggaaatgatttatttaaaatgtagggacagatctagcaggcaaatgctccatacagactccaggggtgggaacacacatctctatacagccaggagtgggaacacacatctctatacagccaggagtgtgaacacacatttgtaacctagaacttaggaggctgagagaagtatattacaagtttgaagacagcctaggctatatacctagatcctgtatcaaaaaataaataaattccatctactcatacataggcaaatgtatttatacacaaatacataatatatacatctattaaaggacaatataacgtgcaagtccctatctggtggtttagtttgtggcaggagaaggaagcacatgcatttttggtgtttgtgccctatgatctagctgcccttccatctaatatagcatctacagaaaggtaggcatttataaaaacagacccccaaatccttgaagtaggagttaacctgcccaaactcacacaccagtgtgaatggacttgaattcaagacaagtggttctcaaaactcagctggttctacagtaacagtttggagttgagggaatagagagagatactgtttcaaactattttgcagttccatggccgaacacacaatagaaaaaaatgattggcatgcttattttaatactgtaaatgttttccctggagagagagagagacagagagagagagagacagagagagagagagagagagagagagagagagatctggtgtggtgagattattaggagaatgttgctgtaggtttacagagccagctgggtagtctgcaaatcggaggtatactcccctggtgtttcacatttccaggaaccttacctagcacaacaacactggagtgattgaacatctttggtggcagtcctctgactgtctgccttctaagatgatttctgataagaaatgagaaactcactgtgaccctgacaagcagaattcaacaaatccaatgattgcctcaataattgcctttgcttgactcctgggccctctgcacagactcatggccgtgttcagctttgcagcatgggctctgagaatctttctgcctagagaatctgtgtgctcagtagactccgctgtcttcatagctgatgagacctcaggatatttagtcctttggcagaagtgctgttctgtcgatcaaagctccaacccttctggctccatgatgtgctctcaagcttatcttgagcacacaggctacctacaccataaaccgcatcgatggcttgtatttggtagttataatagagtctagacatggaagttaatttattacctttaattttcagagaagaacctaaagaagggaaataacacattcctgttctattagacacagtgagaaattctcttactccatatgagacggtaaggaaagttacaatagtataaccttacggtcctttcccatggggccattctctgtggtcattgtagttaccctgaggtcataggcagctttgcccacactggcctcaatgaaatcagagcaggtctttcctatggctctggaaatatgtaacaaacaataatgatgacaataactaagtgcttttgcacctacaggaatctcacctggatactcatagtagactttaaagatagctccgtcgctctgttttataaggaggaaattgagaatcactttctttctcgggaatatatactgtacacattggaacagaactcaaactcagacctggatgaatataaggcacaatatgatagtgtttcctttactgtcctcagactccagtatagacggtgccatgcttccttctttaggtcatgccataggctccttgggttactgtatctctcctcacttctggcacagtcacatgagcatcaaatcaactcagcttcaaagctcatctaaaacttaagagccagtagtctttctctagacatggacacacacacacacacacacacacacacacacacacacacacacacatgctcatattatatatatgatattcatattaaagaatcacttaagttgattggactctggagtatagacactttattaatctactatctctcatcctctttatttgtattctttccttttataaccttacactgttgtttttatcttcatgttcccaaacatttataccttctgtgccttatagcttttataagctatagcagagatcaaagggaaacaagtagctattcatcttctaccttttcacagacccacacttaacctcctcactctatctgaaccctgccttgccctggaatcctcgtgagtacagtttgtatgcatctgtgtacatctggatactgtggggtcagtagttactgcctttacctgctaaggaattcctgcatggagctttttattgtctttcattgcatctcctgactccttctcatctccaagaaatctacccacatgctgggggaggagccacacttcccctgtgctaatcctcatgcctgggagcctctcacttcacacttttccagcatgagtctcagagctacatttcctggttcccgaggcaaattaatagtccctcgcctgtgccaccaaacatctggttatatcagcttggtcacaccttttcattttcctgtttggagagatattaaatgttctctttgttggtccctttgtacccagtacacagaatatagtaggtattcattaactaacaaatgtttaaagaatgagcaatgagagtctgtagaattgtggaaaataaaaagtggagcccattcattttttgtcccagactatgacaacaactttc

SEQ ID NO: 221 - DNA, 1733 bp, Mus musculus
acatctgggaaccacatgtcagcggcagctgtataaagtcagcccagcaaactgagggtgacattttttttgccagaagccgggcagtatggacctcactcttctgtgggttcttctgccactggtgaccacagcctggggccagtatggtggctacgggtacccataccagcagtaccaggactacggtgatgatggatgggtgaatcttaaccgccaaggcttcagctaccagtgtccccacgggcaagtggtggtagctgtgaggagcatctttagcaagaaggaaggctctgacagacaatggaactatgcctgcatgcctacaccccaaagcctgggggagcccactgagtgctggtgggaggagatcaacagggccggcatggaatggtaccagaagtgctccaacaatggattggtggcggggttccagagccgctacttcgaatcagtgctggatcgtgagtggcaattttactgctgccgctatagcaagaggtgtccatattcctgctggatgacaacagagtacccaagccactatggggaagacatggacatgatttcctatgactacgatttttatatgcgaggagcaacaaccactttctctgcagtggaaagggatcgccagtggaagttcatcatgtgccggatgactgactacgactgcgaattcgaaaacgtttaggctcgccgcgtacagaagtccgggtgaagggtcagggcccaggtgtcctgagggtgtcatatcacatatgttaatattgattagaacatctacacttctttcttttgctctcttccctgggatgggagctatggtgtcggctgcctaggcctttctcaccacgatcacacatataaataaactcacaattaagccatgtttctccctttcaacacattccaagacaatcatgtctagttgctgatggcagcttccttgcacagcacatgtacagagcctgcatgcttacagcctgccacccggagcacctgtcgcagccttgctgtgattcgcactataacttgagcttcagattcagcttcgtgaacttggagagaaagaaggagcttgagagaggtgggataaaggttctctgtagccaagtctgtttgagtgacagcacctagagacctcacctggggtggtggggggtcactctctgtcttgagggaacacgtctactctctccttccacaaaagccacatagacttagaagttcaagtaaagatctatgtgcttcagaagagaggggacttggaggtgaaagggggaggtgggagggtttgaggactgagctgaaagactttagacagaaagaacgtcctctattcaaagatatacaccagcagacccaacagtgagaatgaatatgagggccaggaaaacctgtgcgaatcagtctcaagacagaaacaatgaaagaaagataagtgaatgagattcacattgggaacctggggagacaagagtggtcagaggagaagagatcttgggttatcagcagcttgagacacacccagtattcatatgaagactgtaatatccctagaagccatagggacgccatctctggattggtcctgaaggataattctccctttcccatggcacttgaaagtgtattctgcagagatgacactgtaatatctctgtctctagccatttgtaccttcttctttaaaaaaaaataaaagtatcaatattcactgtgccataaat

SEQ ID NO: 222 - protein, 210 aa, Mus musculus
HFFCQKPGSMDLTLLWVLLPLVTTAWGQYGGYGYPYQQYQDYGDDGWVNLNRQGFSYQCPHGQVVVAVRSIFSKKEGSDRQWNYACMPTPQSLGEPTECWWEEINRAGMEWYQKCSNNGLVAGFQSRYFESVLDREWQFYCCRYSKRCPYSCWMTTEYPSHYGEDMDMISYDYDFYMRGATTTFSAVERDRQWKFIMCRMTDYDCEFENV

SEQ ID NO: 223 - DNA, 53795 bp, Homo sapiens
cagtatgtaaaatcaggcacaggactggccctcttggaacttatagtctagtatggggaatcagatgttatcaaataattatacaaatacatagaaaattgtgattggaataagggctctgagggggtttatgcagtcctgtgagagtgtggggaattttctgatctgatacaaccctgagaggttcttcattttgagagcacaagctttgttttataacaggcttcaaaacagatcttctctaccagctggataaccctgggcaattttctctctaagcatcatcgccctcacttgtaaaatcgagaggatgtgtctttcaaagagtatggagatgacattcaatatagtggatataaaagtttgtaccacagttagacctactgatgtaagcatgcaggttggcaagatctcactttcctttgctcaggaggatctccaggcccagggacaacatggcctagtgggaagcctgacacacacataaggacaaatcagagggattcccagttgattttcaggagaagggttacctttgacttcctgaagggaaatggttacagaggtgtttggatggaatgatattagagttaagggtagaaaaatggtggaagtggtgctggctttgcattgaagagggaagcacatggatgcttcccaacatcacacagctggggaggactttcttctccccatgagcacctaaggaccacaagaaactggagacagatgcccagtgctggagacagtcacattgtttcaggatcttccttggatcaaatccagacagttgttccttatatcagtcaggtcctggcaggaaacaggtccatattcaacagtagtgactggagagaattaatgaaataactatgtacagagatgtgagcagggttaattgtgaacatcccagggccagctacagctataaaccacggtaagatcacccctatagtcttaaagctgcagggtgagggagtgaggttgctggaacctagcagaagcatttcccttggaaagggggccagccagcaaaagctaaggctgcatggagagaaacctggccactgccaaccaggccttggtggcagggagccaggggaattcatattttgacccctctcctgatccttccatattctgctggtgcctctcattggccaagcccaagcaggaaccagagggcaagagagcaccttaaggtagcacataaagcctcctagaacacagtgcaggaaagagaaagatctgaaaagtaaatagggaatattcagtacatccccttgcaaaatgacatctgattgttttttgtaccagcagtaccaggctctgttccaagcacggtacatttacatgtattgtctcatttagttttcctgataaattaaagtatgtgcatttctatttgagtgcatgtgcacgtgcatatactctgcagggctttagcaacacagcaaagatgccatagccccgttggtgtctttttcggctaagccaacccactgctgtagagagttgaattattttggtagttgttaatattgcagcattttaaaaagctggggtagaaaatagtactcattagtgtgcagcgtgctcagctccaggctgttgacaggcatgagaagaaggctgagctgctgcctttcctgcagttctcagttctgctctgtcactgcctgtgtgggtggtgtgtgacaggaggcaagtggtgggctccctgagagcaggattagggtgcaaagcccttagcagagcccacaggccacagagccaggggagtatttctactgtaaccaacgacagggtagttggcagaggagccctgcctggttctgcctcatacttgggaagcttacaaaatcataaacatccttatgcaccttagcctgtggttttacacttcgggatgcataaaagtcatgtgggaaagctcgttaaaaaggcagattccgcctgggcgcagtggctcatgcctgtaatcccagcactttgggaggccaaggcaggcagatcatgaggtcaagagatgaagaccatcctggccaacatggtgaaacctcatctctactaaaaatgcaagaattagctgggcatggtggcgcgcctgtagtcccagctactcgggaggctgaggcaggagaattgcctgaactgggaggcggaggttgcagtgagccgagatcacgccactgcactccagcctggtgacagagcaagactccgtctaaaaaaaaaatggcagcttccagggccccacctccaggattccactgaagcaaggctgtcaaaaactcaggaatcttcctctaacatgcctccatggctgtgatgcaggtggtctgtggacctcacatgtatcaatactttggggtgggtgtgtgtttttagagctgggagagacagtatgcttcttaggtgaccaagtccattatctgaagttgatgtaccgtgattgaacaatgccgaaaagaggtgccaatctgtagcttcaggaatgggagcaagaatgcgtgaatcttggttaaagagcaagccgagcttgatcagaggaagcagcacacagaaaacgcactggaggacggcaccagcagagatgtcctgtatgggaggatgttattttcagggaggctgctcctcctgctaaagccctgcccccaccacctgccttcaggattgtaggagggaaaggcttggacaaactgtgtgaactggcaaagtgctctagaattggccaccttgcttccctaaaggatgtgtcaccaaatccctcaatgccgtgtcctccaagagaactggcagggctcaaactagggaactttggcttatgcccaagccctgtcacccaatatttctgtaactttggacatcactgtacctctcaaagcctctatttccaaactgataaaatggaaataagaaagccaactttactaccatcaccaatgcaaagatgaactgagatctgttaaatccctgcacatggaaaagaataaatatttattgagtgctggattgtgtggtttatatacatcgtgccaaatgctacacaaatgaaaggggctgttatttattttataaactttaggtttacccacttaaaaacccaatttcaaattagaaaatttggcttaaaatgacatcacttaagcactttctgattaaattgttttctttcttttcccccgtttgtaaccaaatctctccaatgaacctcctcctgcgcttttttttaaccatggtctctagcgagtcatgagctcagaggttgtaaccagtatcctgaactctgttcctccacttatgagcatataatacatttactaaagcaatatttccagcacctacacatacatctctgtgcttcattcatcctcacagaccccagaacactaattaggcacttgggccctgaagcttccttctgtgagtgtctcagagctaacttggcttagcagcaccccatccccatccccatccctactctcaccccaagacacagtcctggttcccaagctcgcaagttcccaagcttcttctccaccacgatagctcctccatctgcctactgttcccaagcctcctgaattctctaccctcactctgcctttagtgctcagccctgttatcctgacacctctccctgcaaactcactctcaggaacctctgcgattgacattcatccacatattaatggaactccagagagtggtggagccatattcccccagctttactcattcccaaacccctccagtcatcatctgcacaagaacactcttctgccctgcggagtcctggggctgttcattacactaatatgcatgattgttccctcaactccagcttctagtgttaccctgaggtcagactaacaacgtacatttgtttcaagctttacacttgacaaagtctttgcaagaccactatttgatatgactgtcacaataatctcgtggtaagtggctggtgttgtgattatcctccattttacagatgataaaacaaaggttatgggttttgtctgattcagtggttctcaaccagagatgatttttccctccaggagacatttagcaatgtctggaacatttttgattgtcacagtggtggaagagaagatgctactggcatctagtggatagaggccagggatgctgtccaacatcctataatacacagggcagccagcctccacaacaaaaaactatctgacccaaatcaaaaggtcattttgattacttgcagaaccagaactttaacttagatatttggattttaggagtctctgctcttctcacaaccatctgccactgctctgaggccctgctgtgaccatttggcacttggggtagtatagttactaacaaattcaagtcacctttctgtactagctgtgaaaattggggtgagctaccagtgatctctgaacctaattttcttagaactgctggaaggtcaattggtctatcatatgtaaagcacatagtacagtatttagcacacagtaggtgcaccttattctactcctcccaatcttctctatttcctcaacttggattgtcactctttctcctgctgcttccagtatgagcatttttaaccttattggtggccctcggggctaaccccaaatgatatgacagtgggttccacaaatgatcttaaaaagcaatgggtcatgcaagggtggcaagtttgctgaaggtgaggacagcctgggtgtactgaggctattgaatgcctctctcagctaaaccgtgaaactggcacagactcattttggaggaaagccacggatggctcagcatacacttgctgggaagtttgtgatagtactctggccacctagagctgcagccaagtcctgattatacacaggagttaaaagggaaaaaagacagcaggcaaaatggaatcctccaataactcacagtcaatattttgggttaagcatccattcatctggggctaccagcttcacccaggcactagcatgagccttgccttctcctgtctgagcagccctcctcggggccagctcgtcacatctggaattctccagtggatcaggtctgctccagggtgacctctgtaagtctacatcattccctcccaatatacaatagcagctaccccaatccagaaagtgtaaaagtaacttaggaatgagttgattctagggccattctaggtgctctcaattaaaatcgggcaaagtattatattcagaatctctcaaaaagggattatatgtttgagaaagctgccagacaggagtggatccaggtcgcaaaaagtgtcaccagagtggctatgagttcctacacctttcagaagaacccagacttaataagcgttggtgaggatgtggagaagaaattggagctctcatacgctgctggtaagaatgtaaaatggcacgattgctttggaaaacagtttggcaggtcattaaaagattaaacacaaaattaccgtataacccagcaattccactcctgagtatatacctgagagaaatgaaaacatatgtccacacatatacttctacatacatgtttgtagcaacactgttcataatagccaaaaagtggaaacaactcaaatgtccatcaacttgtaaatggataaataatatatggtagatgtatactgtagattattatctggcattataaagaaatgaactagtgatacatgctgcaaaatggatgaaccttatgaaccgctaacataaaacctatgctaaatgaaagaacctattcatgaaagaccacatattgaatgattctattcatacgaaatatccagaacagacaaatccatagagacacaaagtagattgattgttgcctagggctaaaggatgaagggaaatggagagcgactactgatgtgttcagggtttcttgggtggttaaaatattctaaaattgcttgcggtggtggttgcataaactctgtgaacatactaatttaagggatatattgaattatataccttaagtggtgaattgtatggtatgttaattatatctcaatacagccgaagaaggaggaggataaggagagagaaaagaagaataagaggtagaagaaaaagaagaatcatggagacttttgaatgctctttgtcagaatctccaaaatatctcaagtccattatctactaggaggtaagatagcccagtggtgaattgtgtgggcgccagaatcaaaattagtgaactgagttatctaggcttcagtatcactacataacttctcgagaagtgacacctggaatttgggtagagtgttctgcattatctgctatacggtaattctcactttagtgagtatcaagttacctaaagggcttgttcaaacacacattgccgggctctactcctacagtgtctgattcagtaggtctgagaggggccggaggatttgcatttctaacaagttcccaggtgacgctgatgctgttggttttagagcaacaccccaaaaactacttattgaacatttagttctttaaagtccccagggtctattgagtagacttttcaaataacagcagaaatgcgtagcgcaaattagttatatgtgtatgttaatatacatactttataagtgcattatttgacaattattcataaatgttataattagtaactgtaactttgatgaaatgatggaaggcattgcagaatgggaatcagaagacatggggtcatatccttccagttctagaaatttggcccaaaatgttctctcaccacagtttccccatctgtgagaaactaattccaataatgcctcactaacatataaagttatgaggaagataacatagtaacctagttgaaaacacatggtcaactgtaaatgcattaatcttatgttctcaatgtctgcgtatggaaatcattctctatgcggccaccagaatctctctcaaaggcatcagcagtttctggaatctcctgagacactggatgagttaggttgctttcagctttaagtaacagaaatctatattaaaactggaccatagcatgaagatatttatttttgcacattaaagggaatccagctgaggtagttctagctgtagttgaaagaaatctgcggagagtggagatcaggcagaggccctggaaattgttggaaaacaaatgtataataaagatgagtgtttatgataatctgctttgtctcttagagctctttaaggtttaaaatagctcatatcatgtccagaatgcaagatacaactcatgagcatcaggatgataaactgaaaaaattaaaaaaaaaaacaaaccctctagcatagaggttctcaaccctggcttccggtgagaagcctatagggaaggtttcaaaggacgtcattgtcaggaccctgctcagaagcttctgatctgatttgtccagaaattgcttagactctggaggtttccaaaagctttccaggtaatccttaaatgctgataaggtggagaatgattgcttcagcatatcatgaatcagagagatccttctaagctaggaagaattccgatgccagcactgggcagttacttacggatggaagtggtgggagaagatggtgctaaaaacaaaactaagcctcacatagctgttcagcccagatcctctccccctcgcttcagtaaccatgatcatcaaagaaaactgcatgcccaacacacacacaaacacacacacacacacacgagttacttgttgctttattctcatgtatgactgtctttccctttcaagactatcttggtgtttgatctagactgaataccgtctggtaaatgtgccacaggctaggcagatggtgggattaatagtgtgatttttctctggctccacattcctttaggaaggtgactcttagcaattgatgtgaataagaatcacctggaaaatttttcaaaatataaatacctgagcaccccttgtgaggttatgatttagcaggcctggagaagagccactgtctacattttagcaaacttcacagaggctgtagatagaattggtctatgatcacaattctgagaaactttaagaacaatactgacgagaaatgggaaatactatgtgcttaagagatgcccaaaggtttcaaaaaatttgaaaagccaaatcatcaacggatgcatggaatgggtaatgagcacatgaaaagatgctcaaaatcatggatcattagagaaatgaaaatcacaaccacactgaaatatcactacaaacctatttgaatagctaaaattttttaatggcaattttctggtagtggtgggcaatggtatcaccactttggaaatcagctaggtagtttcttgctttcttttttttttttttttgagacggagtctcgctctgtagcccaggctggagtgcagtggcacaatctcggctcactgcaagctccgcttctcgggttcacgccattctcctgtctcagcctcccgagtagctgggactacaggcgcccgccactaagcctggctaattttttgtatttttagtagaggcggggtttcaccatgttagccaggatggtctcgatctcctgacctcgtgatccgcccgcctcggcctcctaaagtgctgggattacaagcatgagccaccacacccggcctcagtagtttcttttaaagttaaacatacattaccttgtgaaccagcaatctcactcctaggtattgacccaaatgaaataaaaatttgttcacacaaaaacctatacatagatgtttatatcaactttataattacatttatgtaattcattatataaaatataatgaatataaaattcattacataaaaagtaatgaattttcaaaaactggaaacaacccaaatgtctttcaactagtaaatgtataaacaatctgtggtacatccatgctatggaatattactcaacaataacaagaaacaaaatactaacacatacaatgagatgttgaattttaaaatggatgaaccttaaaagcattatgctaagtgaaagatggacatgaaaggctacgtgtggtatgattccatttacttgacattctggaaaaggcaaaaccatagagacagaaagtaaatcagtggttaccaatggctgggtgtttgggaagatttgactgcaaagggatataaggggatgttttggattgatggaactgttctaagtcttgattagggtgctggctatgttactgtacattatgtattttaaaaggtgaattaattatatgtaaattataactcaatgaaaagaaaattcaatgtgagggcaaaaatactgaaggataaatagggggtttatttagattaaacccattacattttgagagcagagcacactttctagacttgactgggtccaatttcagcagcatggtagaatgcttaagtgtagaaatcatatccaacttatctccccatgggcccatagtacttccttatgcaacttatgagttctcagagtagccctgcaaactggtatacccgcgcttatactcaagggttaaaaagtgttggattgacaacttaaaaaaaaaaacaggcattcagccttacagaaatcctagatggctctgttacttcagtctatgatttcggtattttgaaatcactgtctgggtatttgtgtggcccggaaggctagtttggagaacaaatacaggggtttgctagtagcgggtagggtaggacagaaaggggtgaggtgctgaaaggtgagggacaaatatgctactaatcagtgtttttcaagtgaatatttctacagggtagagcagcagttggcttttataatctagatacaaagttgttctttctccagggagcttcttagacttacatgctgctggtatattcctagaattccaccttaaaacaagctgaatgtccttatggctgacatctcagcatggaaaagttttgcttaagcaatgacacactgcagttggatccttctcacccacatctggaagccacatgtcagcggcagctatataaaacggtcagaccagcaatcttagagtgacattgtttgccaaaatcccaggcagcatggacctcagtcttctctgggtacttctgcccctagtcaccatggcctggggccagtatggcgattatggatacccataccagcagtatcatgactacagcgatgatgggtgggtgaatttgaaccggcaaggcttcagctaccagtgtccccaggggcaggtgatagtggccgtgaggagcatcttcagcaagaaggaaggttctgacagacaatggaactacgcctgcatgcccacgccacagagcctcggggaacccacggagtgctggtgggaggagatcaacagggctggcatggaatggtaagggccagtccctgcactgcactggggctgggaacatctctgcatatccctcctcctgggggctgctagactctcaaggaatatcagtaaccaaagcctgggcaaatcccaccccaaacctcaccactgcatgctctgggtggagcagggctgctgctgagcagactacatgacaggacaaaaacctgggatggggagtgtctgtgggagacagactcctctgtggctctgttccttccagaagctgttctacctactctcagtttgggccaggggctggtgtaggtcggcgagaagcttgcttaccagactaccaaaagatatgtacagaaactgaaagtaataaactttatagaaattaaaactttctgtgccatcggaatggcatttttcttttttagaaatttatttttaccattttacaaaagtactggcccacagtagtttgggaacaagaaaaataaacaattgatctctcagcacggagggtttgagaactattgatttagagcaagtgaatggaaaagaggggacaaggacatttaggcaaaagaaagtggaattaaatagctgtctactgccttgattaaatgtgctctctcaattatgagtactgaggtccttctctctgcctgaatttaaagtgggttttattgctggaaaatagtttactaaagggttttggagagaggtgctgtcttcccctgactgcattctgccctaagcagtggcatggaattttttcgagcttgtacttttttgtggggtgtgattgtctcagctgggtctcagcccaggtgcttggtcaggagctcatcctagtaggcactgactgctaggctgattatttacaacagcctagatggagccagcactctaggaggcttggaggagagaacggaggaggcagtccagggaggaggaagcccacctggagggctgctgcatgtgctatctgtagagcaacccagatgtgtggcaacaagtacttagtgtagtggggattggaggggtcaagcacaaaatctggccaggtgtggtggctcacgcctgtaatcccaaacactttgggaggctggggagggaggatcacttgagatcaagagttcgagaccagcctagggaacacagccagaccctatctctacagaaaaaaaagaaattagcccggtgtagttgcatgcagcctgtggtcccagctactcaggaggctaaggtaggaggatcacttgagcccagggagtcgaggctgcagtgagccatgctcgcaccactgtattccctcctgggtggcagagcaagactctgcctcaaaaaaaaaaaaaaaagaaaatagaaaaaagaaaaagcatagaaccctgggggacacaaccagtagagaggtgatgatgggaaatccaagaggaagaaacaccgatgggtgggggagccaggaaagagagcgggcctttaagtaatgacaacagctaccatttattgagtgcttaccctgagcaggctccatgctaagtgctttatgtggatcatctcgtgtaatgctcaaaacaagggtatatcccatttataggtagacaaactgcagtctagagatccagtatttcctcggctagaaagctggggtttggatccacagagtctttgcttcaaagagtttgtactttgccacagtgacgggctcctgagaggctgctgcctccacccagagtgggctcccacccgacagctgactctgtcagcagagccagtgccactggaccagattcagggcagttcttcctcctggagagggtggggacctgcaagaccacagcagaagcccagccccagagggatgatccctacttggttaccaggactgtggaggggctcagccggactgtagaaggggtggggagaggactcacacaggcagcagcaggtgagggtgccggggctgtggaggctgcttggacagcctttgtgggccattctcatccacccccatggcctctggtgagcagatttagttattcaaaaccccttctgacagatgctgattcagagaccaggctcaccttgattgttgtctccatgactcctcacagccaggcccactgcctaatgtggagcatggcaatgacctaattacaactgtccctccagtcctcacctctcaggagcactatcgcatgggtgcgactcctttctaacagccgttttttgtgccacagtcaagcagcactcagccatggttccccaagccatagaggaagagccctaggctctgaatcaggaggcctgggtctggatcctggttctaatgacttgtggtgtgaccttggcccagacgctcagccctccagtctcccgcctcatttggaaagtgagcagtcaggctgcatgatctctgaaggctccacagagctgtggctcacccctgaaaacactcttggctttttcttgcattctgttgatctttgtgttcatccctgctagagagagaagccaaatgatgtttagttttaaacttgccaactgtgactggtttgtcatgaactcccaaactatttgaagaaaagcaaaagaggaagaaggtgaaataacatgattttatttggcccatgggagtcaagggaaaagctgataggcgagatacctcttccacctcctcttactcggcatttttgggtgtgcagtgtctagtaattttggtttcctttcctccttccaccctctgttgcctccttctccccgtctactaatcacagggttgaaaactcacaaacatgcaaaacaacttctttacaataagatccagctgccccaggactgacacgaattaccctggaagcacttttaaaaatgattatgcctttgagttcagcctccagtctcagtgaaaaatctgtaaggaaagaaattgcttatgggctggggagctattacatctgacgttggctacaggcttagtctgttctcagggaacagttgttgatggttttgtgcagttgggctgccttgtataaccaaattagctttcaggtttattttaaaagaggggaggagtctcgaatataggtttgacaatagcacataggatctgctaaaaagaaaatctttctaatcaaagtgccatctttaaaaggtgttgccatcatagctgagtggtctgtggtgctgccattgatcacagtttctctgttgaaaatcacctcttcaagtgccggcttctgaagtttggatgatggtctctggcactaacaactaccaggaggccttacctgggtccccatgagtggtatttcaccatcccagggcatgcctaggttgttctcagggaatctgctctaacttgggtcagcacaggctgtagggcactgggtcctgtgtggaataagatgaaggtgaaattttctagtgagattgagctactgtgtagcggaaggagccctgggcttggatgcaggaaacctggattcacagctcctgcttgtatctgtgacattcggtatctcattctggcaaaaaagaaagagaagaaagaaagaaagagagagagagaaggaagggagggagggaggaaggaaggattgaaggaaggaaggaaagaaggaaggaagaaaggaagggaaagagaaaggaaaggaaaggaaaggaaaggaaaggaaaggaatggaaaggaaagaaaagcaaaggaagaaaaaggaaggtgtgactcccacctcacaagctgctacttgtgttactgtgatacttgtaggataaagtataagaaaactctaaagcaaattgaagtctaaaacaaatgcctagcacatcatgggcaggtagtaaaagtttagtgaatctgaaattgatgtggctgatgttgggcaagccagctttccacggagtctgagttcagaggaaaagtgttccatttattggtatctactttttaccccgggcttcaaagaatctcaaggagaagttttggagtggcagtttgtgttagagctgagtttatgaattcaatgacaagccacagactggagaagaggagaaagaatctatgcaacagggctatggcagcatcgaggtgcatttgaaggtggagaggttgggtgggaactccgttttccatggtcggactatttccctaatctaagcaagaccaagcctcagtgtagttcagggcagtcgtcctgagtcatggttctgagtattgagtactcacagggcccacttcctcggggatgctttccaagaccacctcctctccccacacatctcgctgtctccactccctcagcctgctttgtttcctacaatgcccttgtcactacctgattggcatttgtttcttgttttgtctccctcactaaaatataagcttcatgaacacaggggctttgtctcattcaccactgtatccccagtgcctagacaagtgctggtacataacaggccctcaatacatatgcagtgaaagaccaaatcagcagtccaaaccccagccagtgtccccacggccctccgcaaggaggcctgcaggttttcccagaggggaaccattttgcttatgtctttgattcccaatattccagtgtctatagtaggggttccaactgtattgttcacatctcattttgatttattgcatttaccaacatgcaggatggtctttcaagatttcttaaggatcgctaaaacatgcacagaggatggctgacacactttgccgccgcagaatgaagtttttatcaggttttcattctctcaataatcttaaggtctcgatcaatttcaaaaattgaaagtaaactctttatttcaaaagccataagggctaaatgctgcacagtaacctatcctggtttgacatttgtggaagaactgatgaaatcagtttggtgttataccaaggttaatttcttagcatttcttagcattcctagacactctagagttatgaaaattaacattagaggaacctgggtgaagagtatacatgaattttgtgtgctgtctttacaagcattctgtaaatctgaaattacttcaaaataaaatttaaaaaaataaatataaggatgcagcacaaatatagtacaacagaatcgtggaattccagcactggagggggtcttgggcacaatctagagcaacctccttacctcacagaataggaataaaggccatgagactgaagcaattaaaaactgaataaaaacattgctgtcaggttaggaactgtcatcctctttttacaaaagtagatataaatatcagtagaaggggagagatgggtcatggagcaattctgtttggaattaggagagaaatccataactttacataagtataggttctatggccctaaccctgatctacgtggtgatttatgatttatagagtattcctcatttatatgttcatttgtttattcattcactaccaaatgcttattagcacaaactttcccaggccccaggaagatggagatgaataacatacagtctatgcccatgatttattcaaaagctaatattgtttgatcttcacaacagtattggaatccaggtgtttcacacatgaggaggttgcccttgcatggctagcagatggcagacggaggacctgagccagccagcctgattccacagtgctgtgggtgatatgaaatgctgatgttatttttgttcctggataaagccatagtgagtgctgacctaaaaaagatatcaaatccacctaaggatgacttctgagggcaagaaggctgagtgtgggagaatagggttatgacagatctaggattcttgccaactttccatctaggtcactctcctaagtgctaggaatcaattgtctgggggaacttgagctctgcaaaaatggttgttggctgctcttgtaaggatggcaaaagctccctcctcccaggaggggatttgcttctgtctgggaacctgcaggacacaatcttctcaatcaataagagatttctgcagagttaagatatcgtgtgtgtgtgtgtgtgtgtgtgtgtgtgtgtttctttgagggatcttgaagtattgaaaagttaatgaagtttagagtcagaacaattctcaaaatgcagccccactgaccccactactacctttactcaagtcgtctcaactccgaaatactcagctttcacaactaaaacacacctccctagaactgttgttgtgagaattaaataagataatatatgtacattaacttgtgtccttaggggaattacttaccttctctaaacctaagtttccttatacgtaaaatggtgatcgtggtgagaagctcattatttgaacccattttataggattgttttgataattaaaataattaatgcacgcatagtgctaagcacaatgcctgcacattgcaagtccttgataaaggttatttattattactttatcatgactactctgtgtaaactgagactcatggagacaagtatcacacagttggtaaattacaaagctggagttgaaaaccaaattgctagattacagagcctctgaaatatatcattttgcttttggaacatataatttaatcacaatctataaatattatgtgtacattataagtgtcttgaatatttattacattttaatagacacggagatagcattagatctcttgtttaaaaatattataattgatattcataaactcacgtcaaatttactgtgatgctaatgtagctcatgcaattcctgtgtgacctggaattgctctcaggacataaatgcatctcacaagataatctagatcttctcagaggccttaggggaagcctctcctgcctgtatttttccaaaaaaaactgaggaatttgtatttttggaggcattctcgctctgtcctgtgctaggtctttctatccagagatgctgttctgcaggtcatttctgcttcactgttaaaaccttgtagacagactagcagacttaaaacctggacatggagaagacagcagaattcttacccagatgcaggcaggaagagagcagaatgtgtgcaacttaacactatttaaagagactgttcatatccccaccatggtggcaggaggatgagcagtaaacggtgcagtgttcaaaaactttgcattgtagccccatgaggctactcagtgacagtatgtgttaggtgaaatgtgtaatggtgatatcaacatgtcacaaggaaggaaagttagtatgatttggaattgtcaagaaaggaaggatctttgaaggaggagaggcttggtattgccttttgtgctctgatatgtgctttctgaggctcctctcagtgtctaattggagaagttcaatcctgacaatttctaatgtaggctccaatatttactgaaagtgatgtttcgtgactaggatgtagcctgtctttctatcagattacaggtacttttatcatcatggtagtaataactatgacttcccctgcctttcaattatatacgttgtgccaggttctatgctacacttgatatatagcatctctttagtttttgtgtaatactgtcaggttaagaactgtcatcctagttttacagaagtaggtataaatatcagcagaaggggagagatgggtcatggaacaattctgtttggaattagcagagaaatccagaactttgaaggcttcttttactgggcaaacttgcccccaactgtgtttgtctctgtcccttgccacttcactgctccactgtccccaaccactctcctatttctctgctcctctgtctttggtaccagtctacttatttccagtatctgtattatcatagtgtctgcttatcagttacagtgtctggtaattctgcctgtccaatgtcatagtgtttacttatcagtaccagtcttctgaagagattccagaccaagtgcagcatcaggtatagagtaagttctagtgaatatttgtcaaaagacttaatgaacattctaaaattctgtgggcctttttataaatgcctgatagcaactcaaagaattattctggggaaaatagaattaacaaaaatcaaagctttactctaaaagaaagaaactcttttggtactatttaagacctcatccacctttggggcgggaaagaaatttgggagtgttaaggatgctgtgccacatggagtgagccacttgtctagatcatgggcaaaacttctcatagtccatctctgcagtggggttggaaactggctaacagcccttgaaacacctgtgtgtctgtgaagctgggaaaaaaaagaccagcacaaccagcccatctattatctatttaatgaaattttgagagttcttgaccaagatggtgctgcttccttttaccttgttcatcacttgactcaaccccacaccacaccacctaaagtccaaacttcttagcaagtccaacttctaaaattgtatagaggggttcaccaacaaaaccagacactcacacaccttgcaaatgctctgtaattctgcctgtccaatagctttggacttggtaaagaatgcagacaacaagaagaagtcctgtccagcataccaatcagagctgtgggaccatctcgaagagatttattatatttcttgagagctcatgaacatgagctttgacctcagatgaatctgagttgggtcctggctcttccagttactctcttggccgagagttttgtaggcattatcactgactccacacagtgccttaggtgaggctccacaaagcatgtaaaggtcagggctaggactagaactcatgtctgctgattcctcaacaagggctctttcccctgcaccccactgctgttatgttttactattgcagatacaggagaaagtcttccgttttagctttcagggtgatgaccctgagataaatcattttcagaaagtccactttctcagaataggttcacaaatgtgttttcagaggaggagtaattaccttgtgactttccttctagaaagcttccagtttcagatggagcagggctaacaatactccagtttctgaaactgaaattgaacctcagccttcaaagaggtggtaagaaaaaaaaaaagtatgtcttctcagatgggaaggagagtcttgtaagtaaggtaccagtgccctcctgctctaaggaaatagtcttatttccttagagctgcggtcatgttatacaattcaccaggatattagccatcgtattggtgactgttaggaactcctcactcacatccatgaaggggcctgaaactccctccaagtagtttccctccaagcggaatagagcattgagccactgccctgttctccaggccattcaggagcaacaaccaggtgctgtgaagtgagtcagagcattagtcatttgaccgctacccatctcttttgaaattgagtttgagtaactttagcaatgcaatccctgacagttcccccagtcctgttccatttagaagttgcctctcttctcacctagctctgtgtttgtaatcctgcagctatggccagtgtttaggtgagtcttgttaaataaggagctttgttaaaagtgaaaatgagaggaatggaggagaggaatgcccaaagctatatttattttgccccctcatcatggagctgcagggagagaacggaagcaagaaaagggattgctcacccaagatccatgtaaactacttggagggagtttcagggcccttaatggaattgagtgatgagctcttaaaagtcaattctgcctccaataatgggacatagtcgggtcactcattcggtccctcattcttctattaaacatttgctggacaacaatgtcagacactgcatggaatactacttcctgagagtggtaaggcatactaaagtacctgtgctccaaagtgggtggctaagacatccaacctcattgagctttgttttagggaaacagcagctcagggagggcctatgaatccaccagtgttttactgattagagacaggggagccaagggacagcttttacaaagtagactcataattactgtgtagactaaacataagtataatgacactaataagcaatttattaatcccaggaattttacatgcgttgtcttatttggtcttcacgataactttaatacatatgtgctattattatgcccattttacagatgaggaaactgaggctattagagggcacgaaacccgcccagatgatacagctaagaacagtggagccatccagcagcatagccaatgctcttggccactctactatctgctccccacagtgtgaaaaggtacccccacaaagatccggctctggaaggaatgctttcacataccaaactcctgaacaggctgactctaccaaaatgtgaaggcaatcaaaccaaagccggaggaggagggttatgtttggttatctaactttcactatatgttcttaggctctgagtctgtagggtccaaataatcttcacagggcagagttatctgaggtggtgtgtgagaaagtgacacacacttcccgtacaggcactggggccagcagcctggccaacagctggcggggaatttgtggaacttggattgccttcagaactggtactccatgaaacagttcggcttatcttcctacatttatttttacttaggggaacttacccccatgggagctctgtcccctataggggtctgagtacagaagacaagccaaaacaatggaacaacaactccgtggaaaccacagcccagctcagttctgaaagggctttgttttagaggaaggcagcattttagtgatggtaggagaacaggtcacagagagcactagcttatggcaaccttctctttttggacacatatgagttttgcttatgattcttagagcttcatattgaaattacctctcacctactttactaagaattaggatagaatagaacaccctggtagatcagcccctaaagctacctttccaccatatcatgagcctagtccattccactcatatagcttgctgaagtatgccaggcatttacaaagtgattagtatactcctgatgagatgcgagcaatggtagaatgaagaaggctacatcagtcatatgcagaaaactgaaactggaccccttccttacaccttatacaaaaattaactcaagattaattaaagacttaaaggtaaaaacccaaaaccataaaaaccccagaagaaaacctagacaacaccattcaggacacaggcatggacaaagacttcataataaaaaacaccaaaagcaattgcaacaaaagctaaaattgacaaatgggatctaattgaactaaagagcatgtgcataccaaaaggaactatcatcagagtgaacaggcaacctactgaatgggagaatatttttgcaaactacccatctgacaaaggtctaacatccagaatctacaaggaaattaaacaaatttacaagaaaagaagaaacaatcccatcaaaaagtggacaaagtatatgaccagacacttctcaaaagaagacatttatgtggccaacaaacatatgaaaaaaagctcaacctcactgatcattagagaaatgcaaatcaaaaccacaataagataccatctcatgccagtcaaaatggtgtttattaaaaagccaagaaccaacagatgctggcgaggctgtgaagaaataggaattcttttacactgttggtcggaatgtaaattagttcaaccattgtagaaggcaatgtggtgattcctcaaggatctagaacaagaaataccatttgacccaacaatcccattaatgggtatatacccaaaggactataaattattctactgtaaagacacatgcacaggtatgtttactgcagcactatttgcaataacaaagacatggaaccaacccaaatgcccatccgtgatagactggataaagcaaatgtggtacatatacaccatggaatactatgtagccataaaaatgaatgagatcatgtcctttgcagggacatggatgaagctagaagccatcatcctcagcaaactaacacaggaacagaaaaccaaacagtgaatgctctcactcataagtggaagttgaacaatgagaacacattgacacagggaggggaacaacacacactgggaccagtcgggggtagagtgtgaggagagggagagcattaggacaaatagctaatgcatgcgggccttaaaacctagatgacaggttgataggtgcagcaaaccacaatggcacacatatacctatgtaataaacctgtacattctgtacttgtatcccggaacttaaagataaaagaaaattgtaaaacctagatacatgtataataaactacacagttgcacataccaaaaaaaaaaagctagatcatcaaagagccataggtctcaatttacaccttaacctgcattactgagcccctatagctgagttttctagtctgccagaacttcttacaagtcctgggaacagggaattcaagctaatttacatggttgaccgaataccgagcccatctctcaattcttctcacaacataatagcaaagtgattgatacagaacagtagtagagtatgagatgtttaataaatgaatgaataaataaataaataaataaatgcatatttgaattatatacattaggtgaataaatgaataacaagtaataaataataaatttaaaaggacggatgatttctgatgacagacaagtaatatatttaatatctaattttgttagatctgcaagttcattttcagcaatggaaaagaataaatgaaatccacttgttgataatgttacaatttgtgtgtcaacaaggcctctctcaccagtcagcacacggtacttactttatgcattatattttctgaaaacttatcttcccatgaaatacaaggttgcattccagcagctgtctggccatgcacatagacaactgcctgctctggctctgcccactcataagaggggatagaccaatggctgggatggtgggaaatgcaaagaaggagaggtaactgaagaactattttggaagggtttgtgaaagagctcatgctataaggtggaaatccactggatttcatcaaagggccatggctcaccatacccatctgggctttgcatgctgtgtgggggcagaacaaatgatcatccttgtgctcaatttccagggctctgctgttaagcagaagaaatgtttatttgaaattcgtcaatacattgtgcttctctttgtcttctttttattttaaattccagtaaaatgaattataatatcttttattttaaatgacatgcataatacaatcttgaatttgtaaaattctagatgtaaaattctagatcctggataagtagcaagaacagtggaaatgccctgactgtgtagagcttatggtcttgtgggtggtggaaagattcctggataagtagcaagaacagtggaaatccactgtggtcaggtagaaaatagtgttatcatcacagcaaaaagtgggaagcctgaagacgccataggaattgggcccaggaatgggagaaaatcatactagagatggaacaaaggaagaaatgattgtactattctaagtcaatgtttagttcaaaaggtgctgtgaagaccagcagcagcacaggtagaatgaaagagcaaaaattatttcttgtctgtggactggagtggagcggttatatatttgaagaattaggactaagcagctaggacaggaaagggatctttagagggggtttgaggcattcagttggcctgttgcaactctgtaaggactgcctccacagccaggattcttggtggccaccaggaatagaattctgagaaaaacatgccatggctgtgtagagcttatggtcttgtgggtggtagaaagattcctggataagtaggaagaatctgggttgtggtcccagctttcctactgggctgccctgggcacattcaccatgcccatctgggctttgcatgctgtgcaggggcagaacgaatgatcatccttgtgctcaatttccagggctcttctcttaggcagaagaaatgtttatttgaaattcatcaatacgttgtgcttctctttgtcttctttttattttaaattccagtaaaatgaattataataccttttattttaaatggcatgaataatacaatctcgaatttgtaaaattctagatgtaaaattctagatccacccatttatgcaggcttccatctaacaatatatattgaaagaggtatgacaggggcagtgttccctaaattttgttcagttagaaaattctgagtcacttaaattttaatggaggggctatgttatttctacaaatataataaagactattatttgcataaaatggaataaattgttaagaatctaggtcagagaaagagtgtgtaactgtggcagtggggtcttgggaaggggtctgtgtatgtgtcactgttcttaggttcctggggttgtcttctcttcaggtaccagacgtgctccaacaatgggctggtggcaggattccagagccgctacttcgagtcagtgctggatcgggagtggcagttttactgttgtcgctacagcaagaggtgcccatattcctgctggtgagtctggcagccgaccaaaccctcatgactcctggggtgggagaggcacctaggaagtgctctagcttcaggtaagcttgagggtcacacacaagcctggaaggcagcgctggcatatagacaagaatgaatgaatgacttaggaggatgttcccgccaagagggatctttcaggttatccaaccccccacatccttcttttggcagaaaaggaaacagaaccatagagccggcactgactggcccaaagtcacccacctactctgtgggaatgccaagtcttaagcttaggcctaatgactcccatcccagtgctgttctccttctccccaacttctggtaacttctcatcatatccaaggctgcagggcctatttgggaacctagtttcctgtagtctttctctgggagaaaccaatcctctcatgggtcagagtctagtacatagttatagacagaaaaaataaaatattaaaaaattaaaaaattaaaaaaaaagattgtgctgttttctggatccatttggaattccagcctctgatgttttgtttctttccctatccctgggctcatgccgaatatctcctgacctagccttccaattgactaggagaatgtgtatattgtcatttgccctgatgacttacactgggtgttgataacacaaccggcccaggtttttttaatctgaaaatgagccaggcatttctgccttgggcaaggggatccagaagtgtcaacatgtgaaggttggctccctcaagtgattgatctctctacagtttgatgcttgcaaggacagcttcacaggtcatgcttattctctgcaatcagacagcttactccacagatgcccagtggcacacagtatctctagggatacaaagccccaaaagcttaacgtttttctttttaaagtaaggaccgatagtaaattcagagctcaaagtcacctgtcactgtatgatggagcagaaacctcctctagttcttcaaaatcgcttccataaagcagcttttactcctctacagtgggtgaacaggcctggcaaaggattacgatgccactgggataggtcctgaaccaaagacctaaagatctcttgcagtggaggaggtagaaggagcaccagtttgggcaaaaagaaacttgagtttcagtctctgtgttggcctttcctcacttccctcccttctttcccctttccccttctcccctccctctcataactctgcaggctcaagcacatcacctaaaatgatgaccaccttttttgagtctccaagatctttaagactctgatgaaaactatagaccttgtcttcaggggggaaaatgcacttagcatgttaatacaatagtttgcagagaatttcgggagtccttaaactccctgaaggccattcatgaacacactgccaagaacccctggatcataagttgaaattccaaggactagaagatctttcaggttgtgttgaaccctaaaaatgtcttaattccaaagacacttttggaaaagatgatccagatgccagaactgttttgagaggatgaaggaagttccaaagacgagtgcgccctaatgaaaggggagagtaggtaggagcttggcctccacaaatctctcattcctggtctattaacagaatggcacttcccacaaggaaaccagcctccctttgttgcaaagcattaaaagccagttaaaatgtatgtaaattacctgaaagagcaagcaaaacctaatactcagtcagtgaatttatttactacattagtataactttccctgaatcagactccaaaggaacacatcagggctggggtatgctgggtggccaggaggagtgggttcaggagcaggggaaagagtgaggaggtgaggaggtagccctgcacgggctgcagtggggaggaaggggaacatggacagcctaggggcagctggaggcctggatgttggtggctctgtctctctgcccttcgtagatgcctctgtcacagcactttatgcattttaccacctgtgtacagttgctcctctctacctggacttccagtgtctggaggatatggggccactcactgatctttgtattttcaatgcccagtatagtgcttggaacatagtgtcttcttaacaactgttgaacaaatatccacattaataattgtggagggtgtatataatgtgaagtggcccagaaaatataattctcttacataaaattttttgttctctcccccatccctccacttctgcccagaatataagctctacacaagcagagatctttgtgctgacatatgccaagccctataaataatgacaggcacataacatttgtttggatgaaggaatgacttcaggctactttttgttatgagcattaaataagataatatatttctggccttgccactgtctatgatcacacagagctgacctgtcttgaaacagagtccccttcaccctcccagatgcaggagagacccagcctcctcaccaactaacaggacattcaaaggcaaactctgcccaggaacaacctagcaggtgtcaggtcattgcaggaagcagaacttgagagcggggttggttatgcagaggaacaagacatgtgaccagttggacagtctgttgttagatgtactaactcattcttccccaggcagagaggagtaagctgaggcagcaacattcctcatcacagcaaggctcgaggtctctgcagagatgagtgggagagcctgctgtgtctgtggccatgccatcatggttggctggcccctgcccaaacagaacaacaacagatagtgggcttgggcctcaaggctttgggtgaccaggcaggcaaggagctaaggctcactggttttagaaaatttgtcaaggccgggcatggtggctcacacttgtaatcccagcactttgggaggccgaagtgggcagatcacaaggtcaggagatcgagaccatgctggctaacatgatgaaaccccgttctctactaaaaatacaaaaaaaaaaaaaaattagccaggcttggtggcaggcacctgtagtccctgctactcaggaggctgaggcaggagaatggcatgaacccaggaggtggagctcgcagtgagccgagatcacgccactgcactccagcctgggcgacagagcaagactctgactcaaaaaaaaagaagaagaagaaaaaaaaaagcaaagttgtcaaacagaagaaatagggggtggatgaaggtaagtgtgagagaaagggataaacatctaaattttcctggaattcccatattccgtggatctgtgggatctgtgttaacactctgagcattgcttcttgaagcttatcctgtctgtttatttgaatgctgagacctgaaaaagacaggtctttgtgtttccagttccaccgttgttttaatgatgccccagatttccagtggtcacctggagactggttccaggatacttctgcttccccaagaatgctaggtatcgttcctctcacatactttagaaaggcttctcaagctcccttagatgcaattcaccagctaagatgctaaaaatgtaatgatcatatagacatatatgtaggaacaaagtctcaatgttaaagattgatagataaagatgagcaattttgagttgccagagatattcatgtctctgctcacaaagtttacccaaagccttgatctgcaatgactttgccactctgaacccaccccaacccccatacccttcacccttccttaccccatcctaccatccagacatgttgctgttggtctgtggagccaaaaggtggggaaagtacagagaattaatccaaaaggcatgacaagtcaactttgaaacaagtcccactaaggtgtggttccacctggctggttctatttctgaaggcatggtgttagagctgagagctatcacggtcaccaaataaaatggtattttttcaaagaaaacattggagaagcagcagaacaagattcaagtgtgcaccatggtacacagtgtatgactcactatcccgctggtgtgtctagacattttagtggcatctttaaattgcctgagtcatgatgttgtattatatgtctttctaaatgcctccagggcataaattaggtcttattttttcaacatctccaggatattacccagcacaaaatagactcttaataaatgtgtcagatgaataactgaatgttgcaagcccctaggaacagtaacaatggtgaaacctgacattgatgtgatgatgttttatagttgacaaagacttctttcatgtacattattttatttgatccttttaacagccttacagagtgaagtgagaactctttttcctgcaccttcccacagtgaaatgctgataaccctcttatctgaaaccttcccttacatgactttaattagcttgaattacctcccagggaactggacccatgtgggtgggaacgacatttttccccttccctctttgaaaggcattcttcagcacgcagcctgacactgtatgaactagctaagtgaatatctagcgcctgcgtttgtgagcacttagggattcagaaatatcatcactctgggctggaaaaaacaaatcatccaaccaactcccaaatgagtatgagatttatttgtttggtgggaaccaaggtgctgctctcgtttcagcttgtgcggtttctctttggatattacagcctcactggactctggcaagaaagcaaattcctgagagatgtggacatgccattaggaaatggtctccactggattggatgaatagtgaattttatagatatttatttagatatgaaaattctaattcttagtctagtggtctgcaaaccacaaacacatgtcactgaagttgccacaaccctttagacattgtttgtcataatctctcttctccaaacagctcagcagctgcaggctgcacaccagactgtctactgtccaggcggagactctgtgtcccaggatctgatggttgtgaatcattttcttttccaaatggctcttctccagacccatggcctttcattaggttcattggataatatcttttgactgtaaaataatgcatccatttaggtaacctttacttttctcttcaaccctgatattctgtctctcagactttgcattctccactgcctacttccccactctctgtgtgcaagtcataagccagagagtgctttttttaaattcctgtatagctctagttaacatcagttgattagaacattcttatctctcccaccccaaagcacccagtcaaagctaatctttaattcttagcctctttgttcagatgttaatacaagatagggagtgtttgcatgttcactcctgtaatgctgttttagggacatgaacaatctcacaggcctctgcattgctgtgcctgtcatatgccacctgtgcccagacagcctcctgcaattcagctcccagaggcctggtaagaagagcagcttccattaggtatatctcctaatgttagttaacaggtgcagcacaccaacctggcgcatgtatacatatgtaacaaactgcacattgtgcacatgtaccctagaacttaaagtaaaataaaaaaataaaaatgaagagcagcttccatactggtcctctgcgcaagctggaagctattactatagagatggacatacttaagttttgaggaaattggactagatgtctcaatttaaaggaacttatattgggtttagatgctctgcgccctactaaaaccattgccttccattgcatgatgtacatagcactcattgtgcagacagcagcctctctgaacttgagcaaaatctatcatccctttcatctgctggaatggtttccataattattgtgccatatttaaaatgtagacatgtacaattggcactccatatctggggttccctatccaagaattcaaccaactttgaatcaaaaatattcagaaaaaaacaataaaaataaaaataacaatacaacaataaaaaatgatacaaatacaaaaccatatagtataataactactcacatagcatttgcattatcttaggtattatacgtaatctagaggtgatttaaagtaaacaggaggatattcataggttatgtgcaaatgctacaccattttagatcaaggacttgagtttctgaaaattttggtatccatgggggtcctggaatcaatcccctgcagatgccactgatgactgttgtattagtccattctcacactgctaataaagacatacccgagactgggtaacttaacaaaggaaacagtttaattgactcacagttccacagggctggggaggcctcaggaaacttacaaccatggcagaaggagaagcaaacatgtccttcacatgatggcaggaaaaaatgccaagcaaaagggggaaaagccccttataaaaccatcagatctcgtgagaactcactcacgatcatgagaacagcatgagagtgaccgtcctcttgattaaattacttcccactgggtcccttccatgacatgtggggattatggaaaccacaattcaaggtgacatttggttggggacacagagccaaaccatatcgactgtatttggtgcctgcattataggtgatacctctctccttatgttcaaacttcaaaagcagaaatatcatagatgtgtctggctaagtattggttaacccaaggccagctacttagaacaaagtaaacctctcagttacaaaccaaatctgatgctttattctatctagtctgcttccctctactataatagattctagaggcaatcattcttacttctatttattaattcacttaagcagtcaatgaatgtgaatggatatgaaataataacaattcataggctttgggtgagaccctactaatgataatgatgataataataatatttatttattgacacttaccacgtgttcctgtgttactgcatttaatcctcacacacaaaaattatgatactatcatacagatgagggaactgagctatagaagttgtggctcccttcaaagttccaaacttgactcaaccagtctatctgcctccaaatcccatgctctttgcatagtactgagctgtctctagatgaggaataagacttctacaggtgaaatattacataatagcacagtaggcatctggtagaaaacagagaataaaactattttaattggaggggagctgttgaaggtcaagtagcccccactgacatgcagacccagggtgaccaccacataatgtggctaatgaaaatcaacacgagtcaaagtgaatgtgcttactgactagccctgggcttggacagtgagttagaaactcagttccaagagagcaatttggaaagtgttcagggactttcctctactcatttaagctacagatatccctggaactgttattccttcgtgttgtgatacatgtctgaaatgtttgaaatgtaaagtcccaaaatgccataaaaggacagacatggacatttgtttttatttcacacacctcagagcccctgggttcagattttctgtgcagagaagggcacttgggtgactaccagaggtcccgcttggccaatccccagctcttgtgggaagaagcctggggattgttctctgtggctgttttcctttacacataactccatttggggtttattttttctgtctttacaaaactaattcaaagggggtctgatgtagctcctaataaagacaaactaaattaatctgaaatatgttcattccttatagcttacttggaaaagcattatgcaagaggattgatcatgaacagactggctttatttaacaaacttctcaatgatttgactgtcagaaagggacatctttttagctgaatatataaaacgtaagccaacctcaacacaccaaatccgcaaatgttgagtttctcctccaaacccacctctgaaccagatcataaaagcatatttgattccatgcaccagtgatccctcaaagagctcactatattggccatcatgatgttatacagtattctattatcttgctaaatatatagtgctgatgtattagtccattttcatgttgctgataaagacatacccaagactgggcaatttacaaaagaaagaggtttaatggagaactcacagttccatggctgaggaagcctcacaatcatggtggaaggcaaggaggagcaagccacatcttatgtggatggcagcaggcagaaagagagcttgtgcagggaaactctcatttttaaaaccatcagctctcatgtgacttattcactagtatgagaacaacacaggaaagacctgcccaaaggttcaattacctcccactggatccctctcacaacatctgagaattcaaaatgagatttgggtgagacacagccaaactgtatcagctgacatgtcacaggacattagaatgggatatttaaagtaaggtgctaattgagtggtagagaaatagaagaaaaacagaattcaatattgaatgaccaacagaagcttctctaaaatgttgtttgagcataagctgggctataaaagatcatttggaagacattctaattttattcttattttttaaaaagctgaagtatggcttcctcaggtacccgttctgatctgttcatatgtaaatgctggggtttttttccagtttttatggtagggagtctgtggtgtgtgcttttctggtgtccccacaaagtgggccaaggttggggatatgatgtttcctgaccatgagatgaagctgtatctgttcatgtgcacatcaattggagggaaagtcctgaaagaggagcttccaggtgacaccgactaatccagttgccctaatttccccaagtgaaacagctgtaacaaacacatctcagtgctatgaagtttgactttcatagaagaaaagtgtctagctccgaataaggtctcgtagaggtgggttttcacaaaaccttacgctgagtcactttatgtcaaggaatagattgaaaatctttactttaactattaaaaacctaataagttctcaacccaacctctgacaatgaataaaattggccactgtatataactagattgtatctctatttccctttctaaaatggatgtgagagcgtatacctggactcagctctgcaatatgtctgttcttgtggcaacggagccgagacatctatcagcagcagctcagtctatgatattgtatcatagcaaacattcattgagtccagttggatctgttaataattttagagcttcaagaatcttagatgagaaaaatcctatatcaatcttaaaattgtcttcagttcgaactgatttccctcagctcataagtaagatattattaatttttttaccatcagcttcagctgacacaagagttgtgcaagtggctttatgttatcaagttttttcttagctttggaacaactctctgtctttcatcttgacagcagaaaaagtgctgtgaagtgagaaactgtaccacaagagtcattcatctgaaagtgcgcatgcacacacacacacacaccccacacacacaccagtagttttgctttttttgttgttgttgttgtttgagacggagtctcgctctgtcgcccgggctggagtgcagtggcgcgatctcagctcactgcaagctccgcctcccgggttcacgccattctcctgcacagcagtagtttttattaaaaattaagtaatagctaaaattgaataaatctattcaaacactttactttaggggaaaggagaaaataaggcttcccatagaaatgtttgaaaagtagactcatttcaataaaggcatcttcctgacctgcgctcttcttcatcttgccaagctgaaggtttgtttgattgttttaattggtctaggaatgtatggcaatgctcagtatgaagtgtgtttttccaaaaaactgcttaaagtgacctagtaattcacaaggaattcacaaggaagctgcaaccacaccgaactcttccccgacctacactcgcaaagcccagtgtcacagcttaggaaaccctgatcattctgcttccttgtagcctcttttaatttcctgaaaagtccctatgccctgtctcagtgtctagttctgaacgtttaaattcttttttctctctaaggagctattactgggctttcacttattaggacactttgtgcgcgtgtgtgtgtgtgcgcgtgcacatgcagtgtcatcaagcgctaaatgcagccacatatatctggtttgaaaatacagaacagagcatcctgggccacattgactcaatagttcttcctatggatggtgtttgggaggttcactttctaccagtgatttgggtcatttctcccttggtatttttatttcataaagtaggagagatttccatcgatatccaacctccttccctatcctcctttacccaggtttctctaggacagtctaaactcaatcccatggtgttataacaaaaacaagacaaaataacaacaaccaaaagtcacacaaaacaaaacctgtctgggaccaagaagaaaaagtaccaatggtcatgcacctcaccttctctaggacattctagaaattcactggacatcagtacctcatggagaggcttctcggacaaactgtccagttagacagggggcttatgtctggtcactaccaaaaatgaagcaacagagaatcctaattaaagaaagcattaaataacattttccttctttgaagcttaaaacttcttgatgtttttaaaggtaagcttttctttcccactttattccgtgatatttatccaagtatctgaagacagatcagagtggtcagtaaaaacttaaaaaataaaaatctagcttcataatttccaaatacttttggcaattggatttagcttaatgcagtgttgctgtatgtagattctgccttagcaaaaaaaagaaaaaacacacaacttggtaattaatttttacacattgtatccagagatgcttcaaaagttttagaaaatattttttgttccctgaagtaaggaaaacacacaccccctcccacccccatgcaacctcttattctaatttgcattattgatgttctcaacaaacctctctttccttgggttaactttaatacagtccttgttagaattctcatggatcataaatcagtgggatccaagtaaggccctattagttctacttataagacatttaccatgctgggcgcagtggctcatacatgtaatcccggcactttgggaggctgaggcgggtggatcacttaaggtcaggagttccagaccagcctggccaacatggtgaaaccccgtccctattaaaaatacaaaaattagctgggtgtggtggcacacacctgtaatcccagctacctgggacactgaggcaggagaatcacttgaacccaggaggcggaagttgcagtgagccgagattgcaccagtgtgcaacagcctgggtgacagagtgagacttggtctcaaaaaaaaaaaaaaaaagacatttacctgaaaggtaaagtcctgcttctggatctctttagaagcacaaaataagtttctggatttgcaggaccttatttcccttcatgaactcgttaagcaaaaacacaggtacctcactttgggttggacttggcatcctgatagagcataattacgtcttaggaaaagtcaaatcagagaacaagggttagtgaataatgggtaaaaggaatgattatgaaccaagagaatgagctaaccattgatctttctccatctgtgcactgagatcctcctaggagcccttacagtttataaatcaatcttttcatgatttaatgacaatcttggagaaagatcaccatcagtctgcagaggagaagatctttctagcattaataaacagtgatctggtaaacccaaatcagatgaaattattgacactcacaaactagttgttttccaagcgtccctggggtgtggataaagactttggaggagctatttcatggtaaaaggactgttttggtcctgaaggttccagtggcaaagcccttatgagaactgggggattctagactttattccaggatggactaccatggacctactcatatgaaggctcaggatttactcaatattggaagagaaggaaaggaaaggaggaagaggaagaagaaacaaaatagttcttagtgattcaacacctaccatgtactagtatagcacactcatcactcatttttattagttccaatgacaaacctataaggtagactttattcttctacagatcagaaaacagattcattgactttccccaggccatatatttattcagctaatatttattatgtatgtgttttaggtgctggatgaacaatggtggacaaggcaaaaactctacctttggggagcttacattttaattaaataatttttgaacactttgttgactataactcacaataagaaacattaaactatcgcaatatgtacatcttataaacaaacacacatatatatttgaaacaaaatgtttacatacatagactcgtccttactgcatgtgatgcatgcttttatattttcttttctattttatgtctcttttaaagccaattaaattgattttgttatcaactaatgaatcataatctaaaatttgaaaacattgtcttagttgacttgaatagaataggaatagtattgatattaatcaatatcaagaattccaaagttattttgataattccaaagcctggggaggtatcttcatctttttcagtgcacagtttaatggcctagaaaaggaagatgagaagtgggaggagagctgtctgtttcttcacagcctggagttgtttggtggatgtcatttaacttcagtctggatttgccaggatgctcaaactccatctcttcttcatagtgtgtcttctgtttgctcccagcaataataatgtgtttcattttcctctaacctttgttcttcctgcataggctaacaacagaatatccaggtcactatggtgaggaaatggacatgatttcctacaattatgattactatatccgaggagcaacaaccactttctctgcagtggaaaggtgagaaagacagccccttcccaatgggctagggttaaaggagttgggactaactccctgcaaggattttacctgcaggaatttataaacacacacacacacacacacccacacacacacacacacgtagaatacaagtgaaaatttcttacatgcacatatatttctgcaggaactttgacctgaggttttacttatcttagtttcctacctggtcaaggattaactgcagttttggctggaaaatgggaggcagtgggaagtgagctgttctcatgagctcacctcatggagctgctcaccttgcaagtgagggtggattccagcctgctcaagagcagagagtcctaaactcggtatcccttgatggtctaagcttttcccctcactcaatttcaaagagcacttttcctcatgaaacaccaagaggagaaggcaaatatgcttagaggagtgcccattgtcaaaatggacccccttccaccccgtgcctctatatcatccccactttgggttttaggaaagaagagagaagagaaagaaaagggattggagataagaaacacacagaacctactgtcttagtctgggctgctataccacattaccttagactgggtaacttacgaacaatagaaatttattttcacagttctggaagctggaaagtccaagatcaaggtgccagcaggttcagtgtctggtgaggggttgctcgctgcttcagagatgttgctttattactgtgtcctcacgcatggtggaaagggcaagccagctcccttcaacttattttatatgggcactaatcccattcatgagagcagagccctcatggcttaatcacccccctaaaggctcctcctcctaatactatcacattgagtattaggttccaatatataaattttaaggggacaccaacattcagaccatagcatctaccaaccatatttagaaatgaaaggagttaacaatccctcagtaaacctgcaaaaattaatgaaagaagagaatttaaatggcctaaagataaaaacagcactaacacttttttcatcacctttctctcacaatcaactccttaatcctatctcaaatacatcaaaacggtaagaagaaaacaagaattgtactccctattaatatagagaaatgtgtgggtaaattcaggtgttaatgattggtttggcctacttttagtcagccgataatcactttacacagaaatgaattcctgaaaagttaccaataaatattttgcaaaccaaataacacttacattaactcattagatagtatgctatgatgaatttgagtgtgacacatctttggtgtgtgtctgtgttttcaaacagaattacatcttaaataaagtgaacttatttaatatgacctagaatttctttttttttttaaaaaaaaaaaaagacattaagtagctctggaaaggcacaatatatgttgcaggctgatcagcaaaaacctttatgtttacccataggcaaaccactcagtttgcacacattacttatttttactttagatacactttaaactagcttagttaccaattttctagaagcagcaaattagaaagggaaacgagtatatactacttagaatgaaactcattccaccaatgagaataaatagctggatgacatgataacaaatatgcttaagaaaaataaagaaaatgaaaggctcaagaactcaaagaacatgggttgtcatttagcagggccatgctccccaaagtgcaaaacgaaataacaggggtgctcaatgctccaaatgatgacttcagctcaacaagaaaattagttctatgttccctgtttaagaaagcaggaattaatacagtaaaggaagagtgccatccaagattagtatgaaataaatatatctgagtagttaaaatgctcaattcagttttcagtaaattcactttttagtaaatttttcggttatgtggattacccagaatcatgaaaaactgaaatattatgtcattgcattaatttaaaatgagtatcctccccccaaaataaaataaaataaatatactcatgcaactttgctactgtcatcaaaaataagtagcttaatgatccacaacttgggtttcttctcctctgctgaaagatgctgaggtccccagcttggagaactattgtcagggcaggactccttgtgcaagagctttccctccacatgcaaatcatagtggtttcctcttagaatgctgttgttccatctatgcgctattgacatctagggccagatatttctttgtttcagggtctgtcctttgcattctagatgtttagtctacccactagatgccattagcaccccaccctaaccaaaagaagttgcagacattgccaagtattcccttggggagcaaatttgcccccactgtcctggtgtgaaatcagagactgaacctggtggaatcatttggtcttcataagaccaagtctaagttttgctcagcatcaattaatagccttctaaaagagtagtttgaatgcctgatcataagatcttgtttatctgtgtttgttgctacacagataaataagacctggctgcagtaattacagacatttggtaaacccacaggccaccaattttctaatttccttctaaaacaatctatgacctcttttgacaattgcaggaatcaaaatatcacccaggccctggtatcacccagaccctcaagttgatcacccagatttgtgttgagggactctatacccaattgttctaaacaaacgacccggagcaacagactcagaattagaaagcctgccttaagctgtttgagcagagtgagccctgcttcctaggactaagagcaatcagccccacttttcagtttagaagctggatggaggccttgttagtcatagtgtttaggataaattgttgaaaagagggcttgcagattgaaaagggagatagataattctgagtttgtaaaggaccccaccaagctttggaatgatttgcataattaaatatggaaaaactcttcgtttttgccctttatcaggactgtgcaaagggcatggcagccacgtgttcttctgggcttaagattacctagttaggcagactgtgtggtttaagagaaagaccaagatttgagtacaataaactgcgaatctgaaattgtcacctattacttgtattaccttaaagcaagttaattatttctctgagcctggtttttcacctaaacaatgaatcgttgtgaggattaaaagagaaaacacgtaaagcatctggtgcaatgccagatatattagaggctacaattatcattatcactgttcaacagtattagaccacaggagtgtcatgcaatgtaggcactcaaaacatttctcttaaatggatgaataaagaacataaattcaccctgagcaaagaacattccttgaaatgtatccacaccacatttttcaaaatttagtaatgctatgtacactcttcccatccccaaccacttaaacacataggcaattcataacaattcttgtgatgccagaatggcagccattttcttttttaatttaagggactttttcattcctctgtagcagtgttttctgaagggaaacacatgtatagcacagagcccagtgcatggtgagcactcagcatatgttaagtgctcagaaagagtcagtgggaaaatggacggactttttaaaacaagatttttttcttttttttgagacagggtttcactctgtcacccaggctggagtgcagtggcaccatctcggttcactgcagcttcaacctcccggactccagcaatcctcccacctcagcctcccaagtagctgggactacaggcatgcaccaccacacccagctaattttttgtatttttttgtggagtcagggtttccacatattggccagactggtctcaaactcctagcctcaagcaatccacctgcctcagcctcccaaaatgctaggattgcaggtgtgagctaccaagcccagcctaaaacaagattctttacaatgaaatggagatgatgttaaataaatgcttttattccaagctgttaacccacaggtccttgaggtactttctggaggcagcaggggtgagctgaccaccagtgatgaacagaggcctccacacagccagtgacctaattagtcaccttcaagggtgacctgaactcacagatttgtcggttcttgggaaactgcataaagatgtcttctaagagcaaagtgagattaagtgtcccttcagttcccagatcctccaaatgttctctgctgctgtttccccagcagcgattcttcctgccatgtcctttctcactgacattcattttctgactctccctcccacagggatcgccagtggaagttcataatgtgccggatgactgaatacgactgtgaatttgcaaatgtttagatttgccacataccaaatctgggtgaaaggaaaggggccaggggacaggagggtgtccacatatgttaacatcagttggatctcctatagaagtttctgctgctctctttccttctccctgagctggtaactgcaatgccaacttcctgggcctttctgactagtatcacacttctaataaaatccacaattaaaccatgtttctcacttttcacatgtttcatagcaactgctttatatgactgatgatggcttccttgcacaccacatatacagtgcgcatgcttacagccgggcttctggagcaccagctgcagcctggctactgctttttactgcagaatgaactgcaagttcagcatagtggaggggagaggcagaactggaggagaggtgcagtgaaggttctctacagctaagcctgtttgaatgatacgtaggttccccaccaaaagcaggctttctgccctgagggacatcttcccactcccctgctccacatgagccatgcatgcttagcaatccaagtgcagagctctttgctccaggagtgaggagactgggaggtgaaatggggaaatggaagggtttggaggcagagctgaaaacagggttggaaggatttcctgaattagaagacaaacgttagcatacccagtaaggaaaatgagtgcaggggccaggggaacccgtgaggatcactctcaaatgagattaaaaacaaggaagcagagaatggtcagagaatgggattcagattgggaacttgtggggatgagagtgaccaggttgaactgggaagtggaaaaaggagtttgagtcactggcacctagaagcctgcccacgattcctaggaaggctggcagacaccctggaaccctggggagctactggcaaactctcctggattgggcctgatttttttggtgggaaaggctgccctggggatcaactttccttctgtgtgtggccaggagttcttctgcagagatggcgctatctttcctcctcctgtgatgtcctgctcccaaccatttgtactcttcattacaaaagaaataaaaatattaacgttcactatgctgaaaatattcagggtcagtttttgctctctactctttcccttgctgattatttatccattcattctgaaaatcctggttagcattgtggtttgtgccaagcaccatgcagaccccaggaataaaatgatgacaatgacagagtgtggtgggggaatcagatatttaagacataaagtgctaaatgctttacttaagattaaacaaaggaaggaatcacatttcttggcctttgagttcagcctaatcttttttcagcatccttcaaccttcctcatcccaagatgtcacatgaatttttaaccacaggaagtccctcttttctttatccacagcagattgccttttttttttttttctgatccatgctgctcttccctcatcctctctcccagtggacccagaagaagagccagccaggcaaaaccacagggatcgcgtaccctgccatacaccccctctaggtggtcaagaaggtgactctcagccagtggtgatggtatttcccacggcaagatcccagcattgtgatggggaaggcagggctaaggatatcttctcctgccttaactcctaaaacactttttcatattagagctttgctttatttcctccatgtcattgtttctgactctctggcaattttaatttataataagatgcttcggtgttatttttcacaaagggagccattaatattttagcaatttcagcctggttcaggatggaaaccaggaaatagccttagttgggtatgtggagcacagcaggaaaggagacaagcaatgctgattggctgacttggcatccatgaagaaagcaaatggctggtgagaggatggggagctgggagggtgcagggagcatggctgggggaggagaggctgcagctgggagtagccaggagactgcaagaggacataagtcaagaaaaaaaacttctttaaagcaattcaataaatagtgcctgtgccaagtggaataaaaggagtttctactaagaagaaaactattatttgcacgtagataggccaaggacaatgacagaaaagacattgtcaacttggtttgaatctgaataattatactttatgttataggtctttcaataagaactaagtgtcagagtgaatactaaatcccagatctggtaactgcaagttttgttctctgttttttcattactccaaactttctactaacttgctccacagtcttggataagtcacctctcctttctaggcctactgtttaaaatgaggacatttatctaggtaaccattgtggtttctcgcaattctaagaatctctgaactctatcacctcctgaattgtttataaagggattttctaaggcattttcttccaggaaaggagcctggaactaaagatgataacctagggcctaccgctggctctgacagagggtggctgtgtaagattagagaaatccccaagcccccttcccctcatctgcccagtacaggtaggaattcctttctaaacaactttacaagatgctggccacatacaatgagataatagaaagaggagatacatgattcctgcctcacaaggccttcagcctaatggtgagatgagaagatagatgatgacaataactgcaagaaagtttcctgaggaagccaagtctatgtttggccctgaaggacaagtaggacttctgaggtgagtagaaaagactgtaagctctggcgtcagacttcctggacacaaatcatggtcctgtcacttcccagctttatgaccttggccacgtcacctacctttcctgagactctatttccttacctgtagaaatatagtacttacaacacagggttactgtaagaattaaatgagatcacatagtgtcttgcatataataagtacccaataaatgtagtcagagaaggaaaacagtgtcagtatatattggaaataaaattccttaggtaagccggattttagtaaacgtcaataataggaaacatttatcaagcaaacttaagtcccacttacatttgctcagtaactgaatcaataaattatcaagtgtttattatataccaaccattttactaggcacagttcctgcattctggagaattataaactaaaggagttagtcaagcaaacaaaccgtgacagtacagtttgataagtcaagggcaggcggcatttcaatagaaggcggtgagaggtcaggataggaaaggggatggtagaatttaaggcaatggaaatgatattatggaaggcaaaaaataaggtatgcatttgagaaaggttctccaggaaatactggccttaccaagggggcctgggaggtccaacatacagtcatattgttctaaagagagattggtttctcacatcagtaccataaggcattccacaatttggtcatgttagtagtaacttattctatctatctggaactcagatggcctggagaagttctctctccatcctggcccttcatccatatatatgtcttcatgcttgattgctttaacccaaacatgaaactcaacacttttgtaagttccttcagaaaaattcattctcacaaaagcattagtgctcacaaatgcttaaacagatctgggatttagtccccacaaactcaaaaacaacaacaacaacagattctgcatatttctgtctttataaatgttcttgttcaccgggaaatcaaggatttccatctctctagctggtcccccagctagctccaagcctacttggttcttctcttattaatcagagaaaatgtttctcaatatagtccatgaccaaacagttgtgcacatcacggtggccaatagaacagagatcacatagtcaatagcatccactctccttttaaagtctcagtcagttttaattaaaccacttctgtttaatcgaaccacattattaagcagtgctatctgaacctggttaccatcctgagatccagaattggtgagactggataggcagaacccttgataaaatgttgcctagacatacttgggcatagcatccctttcctactaacttgttgaatctctgttattaaatgcattcctttataaagcaagaattaaaaaacacacgtaccttaaaatttatggtaagaaataataacatattcatgcatatctcagattttcatatcccacccatatctcaatttttcatagaatgaaatatttctaaaaagtcaaaaccaaccaaaaatccctattaattttaaaacctattcattagatgccactgtgtcttgctaagcacttgaatctacctttgtgtgaccttcttcttcctctcacaccaatgcaggcctatttatccataagaagcccagttataaatgtgaatgaatgactgtatcagtgaaaaatgctcaatagaaatattgcaaaatgcaaattatgaatttgcattgtagcattttttattcctttgttcttctatatacttttctgccttccccaacttataaaaataattatcattgattgtatttataatcaaaaaagaaaagtaattttaatcttataaaacaaaaaaagtcaccggcttccaggcagttcagtcctaggacaatgtttcagctgaaaggtgaccatatggttacttcatggaaagaaagagattatgaagccaggccctttcatctaaccggccgcctaatgggttataatttaatatgcagaattacctgctctttccaaggtctctaaccatccccagagacaatggaacagatgtgcagcctgtcataaggccaatgtgaaactaacatttacagcagaagctggaaatcttctccccacgtcttccacgcatggaagtcctacttcagggccaagtataaattcagcttccccaggaaacttccctgagccttccaagactggggctcttcactccctcagcattctgtgtctttatcttcatgtccctgaggacaggagtctcatttccgtttgttcattggtaaatttcccatgcctagctaagtgtttcacacataatgggcatccaagacatgtatttttaaactaatctggatttctggttggtttcaatagatcgatcaacactctaagcaaccaaaaactgaaaaaacactttgaaaattatgaaattctattaacaggcaaggtattatgatggtactgtggttctgatggaggttaataccactcttactctctttattcatcattattgggtaatcattcatttaatccctttaagagctattcactaatgataagtgagttggaaagtataacatacgatcacaatgatcacttacacattcagaaagtgtattttactatcctgggtaacataacaattttggtgtttttatgaactgtgaactgtatcaaaatcaacacgtgagcagctagcacagtactaggcacttggcagaaatgagggaaagtctcactgaataactccttgggagactgggggaccaagaggcaaaggggctcaggttggtaaaatagtgtaaacctgtgaaaatttggatgctgtttttaagtctcatataagcatatgagttctaggggtggggtgggcggggatttttgtctgatatatcccccgcacctagaatagggactgacccatggtaggaattcaacaaatatttaatgaaaaaataaaagtagagccctaagacagaccctaatgcagattatgacttcattaacatagaccttatagccttttctttttcttgttactcccactgaaagtgtacctgtgggatcacctcatgattagatggaccaatgcagtgaagctggtttttcagaattaggtagctttctttttatatggctgtctagcaggcattcgtagaccctgctggtgtctggaatctgtcttctctgtgtctggtagatttcagctgacctgggtgtctctgtgggcctcttttgttggcagactcaaaggtgaactcattagccattacccccttggaaatatgttctgggaaatcaaacatgctctgagtcacatctgtctgccgcctaccacaacagtgtagtatgcagactggttctgccaataggcttctgggaggaagaaatggaaaatctgtcatggtatgaactgcacagctcaacttggagaaggacttcagtccacagaaattcacagagtgaaggcaggctcttagttctcttcatgcataggtaagcctcgagaaaattcccaggtccctgcagaggaggagaaaaaatggaaagaggtggacaagtggattgtgttgggcagggcggcgacactcagtgctttccagaacggcactttggcttgttctaaatggataatgtcacatggctatgcttttgtacacataaggttgatcgctacttcaacaaggtgccattaatcagcttccttgctcctggtacaaactgaagaaagccaagaagcataaaacacatgcctttcctcagagagattttttattctagagagggagaaaagaacaaaaaactggaaaggttaatgaataaaagaaggctgctcacaatcccacacccagtgagtaatacacaaagaaaaccttatgctattgcagagagcaaaggatcactatgagctggagaaacagaaggcattaggacaggtagaagatgaagaagacttatgccagcagcagagactgcctgagcaaacctatggaagtgaggaggctcctcaagaagccaagaaaaaccttgggtctcctgaacccaattctcaggctggagcccagtgaggcaaatgaattgcccaaggacacctatgagtaaatgttggggacacttagaattcaagcctctgggatctgagcttggttatatcctctgtcaggtccctgtccagtgagtggtttagtgaggcgaagagagagggagagaacatgcattgcaggctcttgcactctatgctcaaacaggctttcccatttgctactcgcagataccctagactggcatagttactgccattttatagataggttcaaaggtccccaaaataataggtgacttgcccaaggtcacacagctagtggaaatggatgttgaactgaagtctagctgtttacaaagcccagtcatctcagttatgtcaacttggagtcaagggtttccactgggagtaaggagagataactgctttaaactctgctttttaaataatgttcaatttgaaatagttgaataatgtccaattttaaaaaatgattcaaagatttattccagtattttaaacattgcctctggagggagagatggcactgtaaggtggtcaggaggacgttgttggaagttagaacaccagatgagttgtctgaaaataataatgttgctactcgactgttttatattactgtaaacattacccactataataaaatcagacacaggttcaacatctcctgtagtaataataactcttgtctgccttctaaaatgactcctaaataacaaaccctccataaactcaatctaacccaaataaacagaattgctgtgacaaccgagatcataattgtctttgtttgatccttcagcctccacaattgtgcaggctctccacaccgagtcatggccttgtttatctttgctgtgtgtgctctgggaagctttctgcctagagaattagcacactcaataagcatcactgttctcttcagttgattaaactccagcatactcggtctgttagcaaaatgtgttgggctgatatcacagttctagctcacctcacctcatgttgctctttttcaattttatcttagactgtgcaggttttctgcatcataaaccaaattaatcactgagatctgatagttataacagattctagacacataaattatttttcattagctttaattgcctgtaaaggaatttggacacttaatctaaggaagtgaaataatgtggttcagctctattagacaatgtaaagctctcacttattaaaaaataaaaagtgtagaaaggtaagcaaatttccagtagctgcaaccttaaggtccttccacaggaagccaatctctatggccaccaacagagctgtctttgatgttacgtgcaacttcagtccacactggcttcagtgccttcagagcaggtctctatctcctgaagatccaggtctttgattctcctatggctctaaatatatataccaaataataatgatgactacaattaattatttttgtgcatactctgagccacgctctttacttaacctttatatgcacctcatatgaatactcaagtagatttccaaagtggctatcattatccttattttacaaaggataagactgacacagagggattgaattcctttctcagggacataacagtacacactgaagcagaactcagactcaggcctggatgagtccagagcctgtgcattccaggatattctgtgctctcctgagactccaatatagactgtgccatgctgcctcctataggagtaacagccgctcctggcgtgttttctctcaccacctagggctcagccagcatgaacaccacgtcaacttaacatgaaagctaacttcaaacattgagtctagtaggtcctttcctggtacacatggttcatgactgtatccccagtacctcacagagtacctagtacattgttgatgctcagtcacaaatatatgtttgttataaataaataaacccaataaataataaataaataaaatataaatatatatacaacatatgaatggaataaactcactaagtgaacatttttggagtgaatgaatgacttagttgattattcttggtagatgctctaagtggcagtcccttcattcacctgttcttcccccagactcttcattcgtagtctttcaatccatattctttcactgttgctttcattcccatatccccaaacatttacactatctgtgaccttagaacttataccccatggctctaaaaaaatgaaaaagtatgaccacacatattccattttttcatagactcatgcctgacctcctcaccttaactgaaccctggctttccctgcagtcctcttgagtgagggtcatgcattcacataggctctgagtcctgtggaatctctagaataattttcacctcctaagtaattcttgaatttgagccctttcatctattctccaactgtctcctttattcagatccttatccttgctttcctgtctcctttggtctatgcttttctttaggaagtccatttaattgctggagggagatttttccaaaacataaatccaataggttgtatccccacttaaaatttttcctaaacactttccaagcaaaccacatagtctttcagtggcatagcacccttcacacacaccgccaggttcctgtgctccagatatgcagaattagtcacgtttccctgaagagaccatgtgtccctatgcctctgtgcctgttcacatacaatttcccatgcttggatgcctctgtacctgtaccttctttccctggaggactttcagtggtgtgtttcctggtttccaaggtgagttaatagttcctcactggtgctgccatatacctgattatacctacgtcatagcacttgtcacatttctgcatttttttctattttcacagtaactaaatgttctcattgtctcttcatacccagtgcccagcatatggtaggtgttcattaactattaactatataaatatttaaagaatgaaaggagagtcttctgacactaggcagtctacagttccatggaaaataaccacaagtagaactcatcatctctattccagactactgcaatggctttctacctaatgtagctgtctttgttcttgctgtccccttcaaattccacttacacacaaatgccagagtgatctaacatggaaatctttgactccaatgcttacacttgccatgttcctcatagtagatgggtttaaactcaacttcttaaaaaggcattaatgtcctccatggagtagtgtcctctgtctctcatctcctcactccctgccttccttgatccctctctggctggttaggagacagggaggaaatacaggaatcttaaaatactgtgtacagaacaccatcactgcctttgccataatgctttatggtgactttatgaaaattatgttcccatggccagacagtaaattccttgaggacaaggattgtattatatttctctctaaatccttggtagacagcacagtttctgacccatagtaggtgctcatttatgggtattgaattaatagtatctaatgataggcagaataatgagttggcatgaaaaatagcacaatgtgttgcaaaggaaagcaaacttttggacaaagatcaggtcttccagcagacaataagctaaatgtatgacagaatgatacaggacgtacatttctcattaaagttcttcaactgagaacaatattttgtgaatatactttggttcaaatcaaaatcttatcataaaaggtatgtttaaaataaaaatgcaaattatcttcataaattcagctaatttcataaagcaaaaagcttctagtacacattttcaaaactaatgatacataacattaacatgagtgcatttactggtagaatacacagcagctaatgacattccattacatgttctctctcattggtagccaccactcgatgtctcctatgattaggcaaagattcagtcaattggtcaacagtacgaagtaaaatcatcttgtggggacagcaccatatttgttgcaatagggaataataaaataacagatttctgacacttaggcatttcacaacttatttagtgaaaataaagggacacccatgagcaataagagatagcctataaatacaaactgcctccagtcaaatgtgttctacacatgattattactaataaacacaaacacaatgaacaactgtacagttcttccacagg

SEQ ID NO: 224 - DNA, 1779 bp, Homo sapiens
acatctggaagccacatgtcagcggcagctatataaaacggtcagaccagcaatcttagagtgacattgtttgccaaaatcccaggcagcatggacctcagtcttctctgggtacttctgcccctagtcaccatggcctggggccagtatggcgattatggatacccataccagcagtatcatgactacagcgatgatgggtgggtgaatttgaaccggcaaggcttcagctaccagtgtccccaggggcaggtgatagtggccgtgaggagcatcttcagcaagaaggaaggttctgacagacaatggaactacgcctgcatgcccacgccacagagcctcggggaacccacggagtgctggtgggaggagatcaacagggctggcatggaatggtaccagacgtgctccaacaatgggctggtggcaggattccagagccgctacttcgagtcagtgctggatcgggagtggcagttttactgttgtcgctacagcaagaggtgcccatattcctgctggctaacaacagaatatccaggtcactatggtgaggaaatggacatgatttcctacaattatgattactatatccgaggagcaacaaccactttctctgcagtggaaagggatcgccagtggaagttcataatgtgccggatgactgaatacgactgtgaatttgcaaatgtttagatttgccacataccaaatctgggtgaaaggaaaggggccaggggacaggagggtgtccacatatgttaacatcagttggatctcctatagaagtttctgctgctctctttccttctccctgagctggtaactgcaatgccaacttcctgggcctttctgactagtatcacacttctaataaaatccacaattaaaccatgtttctcacttttcacatgtttcatagcaactgctttatatgactgatgatggcttccttgcacaccacatatacagtgcgcatgcttacagccgggcttctggagcaccagctgcagcctggctactgctttttactgcagaatgaactgcaagttcagcatagtggaggggagaggcagaactggaggagaggtgcagtgaaggttctctacagctaagcctgtttgaatgatacgtaggttccccaccaaaagcaggctttctgccctgagggacatcttcccactcccctgctccacatgagccatgcatgcttagcaatccaagtgcagagctctttgctccaggagtgaggagactgggaggtgaaatggggaaatggaagggtttggaggcagagctgaaaacagggttggaaggatttcctgaattagaagacaaacgttagcatacccagtaaggaaaatgagtgcaggggccaggggaacccgtgaggatcactctcaaatgagattaaaaacaaggaagcagagaatggtcagagaatgggattcagattgggaacttgtggggatgagagtgaccaggttgaactgggaagtggaaaaaggagtttgagtcactggcacctagaagcctgcccacgattcctaggaaggctggcagacaccctggaaccctggggagctactggcaaactctcctggattgggcctgatttttttggtgggaaaggctgccctggggatcaactttccttctgtgtgtggccaggagttcttctgcagagatggcgctatctttcctcctcctgtgatgtcctgctcccaaccatttgtactcttcattacaaaagaaataaaaatattaacgttcactatg

SEQ ID NO: 225 - protein, 201 aa, Homo sapiens
MDLSLLWVLLPLVTMAWGQYGDYGYPYQQYHDYSDDGWVNLNRQGFSYQCPQGQVIVAVRSIFSKKEGSDRQWNYACMPTPQSLGEPTECWWEEINRAGMEWYQTCSNNGLVAGFQSRYFESVLDREWQFYCCRYSKRCPYSCWLTTEYPGHYGEEMDMISYNYDYYIRGATTTFSAVERDRQWKFIMCRMTEYDCEFANV

SEQ ID NO: 226 - DNA, 22582 bp, Mus musculus
gtagcaaagagaggggaagccataatcagaatatatcttatgaaaaagggtatcctcaataaaacaaaaatagaaaacaaatctattttcagtaaaaattatggactcctattgtgttatttcttattcttttttttttctctttattttcctcgaatgcatatgaagatacaagctgggcttagtgacacaggcttatgactcctgctattgagcccacaaaggcaggaggatcacagacttttattcagcctgagaactgagtgaaactcttcttcaaaggtaaatagtaaaatgaagaccctgctatttacctgagtatgtcagtgcttgcctggcatgtgtgagtccctgtccaactcatgaaggatgacaatattcaatcacctataacttaaattgttcattgtaaaataatttataataaaaagaaaagaagtatggtcaaagaagccatttatggttttttttcattttttttatttgatattttctgtatatacatttcaaatttcaaatgctatcctgaaagttccctataccctcccccagccctgctcccctatccacccactccagcttcttggccctggcattcccctgtactggggcagagaggtagatcaatagaatataattgaagacccagaaatgaattcacacacctatggtcacttgatctttgacaagagagctaaaaccatccagtggaaaaaagacagcattttcaacaaatggtgctggcacaactggtggctatcatgtagaagaatgcaaatttatccattcttatctccttgtacaaagctcaagtctaagtggatcaaagacctccacataaaaccagggacactgaaattaattgaggagaaagtggggaaaagcctcgaagatatggtcacagaggaataattcctaaacagctatgtatgtttttttatctcctaccaaaaggtacattttcaaaagtacagagttaagctgacgtgaggaagctgtttgagtaaacatgaagattctgagactgaaacataacctttggttttcctgagttatcggcatttaatattatatagggcttcccctaaaataaaaattaacaatgtgcaacaccattataaaatatgtaattgtagttgttttcctagcattacagctaacatgatacaatatggaaccggtccaggttcaatgtgtgagttagaaatcaattggagttggcacaattttctgataaggactttattggctccaataatggcacaggtcatgagaaaggcacaaagactgcctgtgactgccccaattccagcaatcaatgtcaacatcccagttctttactaactttgcttattggtctcagagatttaaagtctatcacttaatttattttacatggagcatatagcctgattaccttacaatgatatgagaagtctaaagtaacaccctggacataaggttactgtgtatcaaagcagggtgattttactggccaaggttcaataaaaaccagctcaaggctatttttgacgtgaggccttatacaacatcttccagtaactctccagatatgccatgcttggaacaagaatactgggctcttgataaagggaccatttcccactcatattttaaatgtaacaacatgaagctatccacatattatttgacacaggagaaaagacagataaaatgtacaaaagggataatttaacttttgacagaggagacattaaaacctagtttttggttataacaagaacaaagattcctttcttgccaagaaatgaactgtaaatatcccaaggccaattcagtaagcatagaaattgaacaacttttcatgtttagctagtcagcagtgaaaccaaggtgctacactgcagttagagacattataccccaaagttttattacaagtattgtattacttcaattaaagacaaaatttaatggaggttttctttaattgtggttatatttttgagattaattatcactaggattaatgagctctcacagaggggcatgaacataaatgtcaggagaagagtcaactgtgcattttgatttatgtatatttatacatgtttttcatatatttaaattattaaatgattcaatatgttaaatgttactcatgtaattttttaattatcatcgtgataaatatgatatttatcataggaaagctctatttgttatgattgagtaggagcttgtagagtaaattagaatgttttcttaggaacattttaaacatatagtaaagtagaaaacaagtataaatgctgtcatgcctactttttggattatcaatttttaaaatttaggctatttgttttgtttctctattctcagcccaactctgtctcttttgtcttgaactatttgaaatccaaatatatcctttttaccctaagtctcttaagtgcaatatatttgaaaataagtattaaatagtattttaatcataaacatccatagtacaaaaaattttctctatatatatccatatatccttatatatctcatatattcaaatatatatttgagatccttctcatttttagacttcacacaacctctctctctctctctctcacacacacacacacacacacacacaactaaaaataagcaaaaattaagaaattctttcacataggattcttcagctagttatatattaaaataattgttttggaacaaataaatattagcaatatacatacatatatatatataaaataaggagatgaaaagattgtgtgtgtgtgtgtgtatgtgtgtgtctaagttggaggacaatgttgtatagggtggtcagttattaagatgcaattcatgtcaataggcaaactagccagtgcttttatacactgagcagttttgcacaattgcacaccttacatatccataaattaatcacaatagagaaaattgaaaaaatttcatagctaaatgttggcacatattcatagttgctcagtttatttccagaagacatcttattagatgaagctcagtaagtttccttattagatgttttcatattctttcaagtccttctggttattggttcatgtatatgtctgtgtagctttgtgtgtacctgtatgcacatggatgcagtggccattgaatagtctttggggtttttttcttaagtgtaactccatcatcaaccttgtttttctgacagggattggatagggactcacacatgctaggctagccctgaaggactcagaaaaacattcagtttccattgtactgtttacaaggtatgctgtctgaatacagaatctcagagatccaatcagactctgcctcctccttcccatcacagggcttaaaagagaacatcctcagtctagcttttgtttttaaatgtgggttctggtgatggactcaggtcttcatgactataaggcaagcaccttgttaggcaagctctcactatctagtcaggttcttttaaaattttttgttgttgttgttgttttgagacaaggtttctctatgtagccctgtctttcctggaactcactctgtagaccaggctggccttgaactcagaaatccacctgcctctgcctcctgagtactgggatcaaaggcgtgcaccaccatgcccggctggttcttttaatcttaaattttgtctttcctcagtgaacatttttagtttgtgatatattacattcgtgattcatttgctaatatatatttattcaaaaaacaattattttaatatataattatctgaagaatcctatgtgaaaaaatttcttaatttttttcttatttttagttttgtgtgtgtgtgtgtgtgtgtgtgtgtgtgtgtgtgtgtgtgtgtgtgtgtgagagagagagagagagagagagagagagagagagagagagagagagaggttgtgtgaagtctaaaaatgagaaggatctcttggagtgcttgttactgtcaattttgagctgtctaacttggatgctgggaaatgaactctgaacctttacaagatctgcttatgctcttaacttctgcacccacactctaacctgtaattatttttattctctgagaatttaatgcatatctacaatcaaatgatcacatctaccaccatttctgaactctctgtagattatctcccaaagtttatcttctactattttaaattttaaaatttctctactaagttcctgcaaagttcctgactgtattggctgtttatttatatagttctgcatttttttaaaatcaactatccagatccctccctccctccttctacctcctgtgattattttgttaccccttctatgtaggattgaagcattcacactttgtttttttctttttctttaggtttatatgatttgtgatttataccgtgagtgttttgagtgattaggctaatatccacttatcagttagtacaaaccttgtgtcttcttttgtgtctgggttaccttacataggatattttctagttccatccatttccctgtgaatttcatgaagtaggggaacggaaatacaggagggcatgatcaggtatggaaagaatcagaagagaagtacagagggtcatgaaatttaacagaaatatgtggcagtgggacatagggaactggagtagccactagtaagtcctagatcccagataaggaagtctcccaggacccaattattatgatataagctgaaatatgcaagaaaggggagagagaacctgtaaagaccacctccagtagataggcatgcctcctggttgagaaatggggccacccacccatctcaaaaattttaaaaaagaaatgttcctatacaaaagaaagacaggaacaaaaaatgaccagagactgaacgaaaggccatccagagatccagcccatccatagacactgacactattgctaatgccaagaagcacttgctgaaaggagccttgtctgactgtcccctgagaggttctgccagcatctgaatattacagatgcagtcacagtcaaccattggactgagcctgaggaccccaatggaagagctagtggaagggctcaagaagctgagggcaattgtaaccccataggaagaacagtatcatctaactggaccacccagagctcccagggactaaagcaccaaccaaatagaatacatggagggatccatggctccaactacatatgtagcaaaggatggccttatctggcatcagtgggacaggaggcccttgatcttgtgtaggcttggtctctagtgtaggggaatgctagactggtgaggcaggagtgggtaagtgggtggaggagcaacctcatagaggcaatggggagatgaaatgggatgggagtgttgtagagggaaaactgggaagggggatataatttgaaatgtaaatgaataaaatgatgaataagaatgaatttatctttttaggaaaagaatatgatgcctatacttatgattaaatgacttgaagaagttccatggacttttcagacgagtctgtaaattatgaacttaaatctcaatatcacaacagatgtctacctttattcacaaattgcattagcaataacagtatgaggatcaaattttatagacatcccagtataaccaaaccaaaccaaaataaaccaagttaaacacatgaccctcctcatttaagcacatctatatattcctatgttaccaatgaaaatgaggtggtaatttaaatcctagacaaatgaccactttgcaagagagctttttaaggaatgaaaccttttgttagatttctttggtctctattcattactctctccatctacatcatttcatttatcccccttaagtgttaagttctctggctgcctcttttctggccattttgccattattccattattcaacagagacagcatacttgactcagaaagcatgcttggctcatcaggcctgctcaaaaccttagtttcttatataaccttaaatgttggtactaattctaatttatttgcccaactatacttatgacacagaattctacataaaaatattacagggctataatcatattaaattaaatatgctcctgagataatctagaagcaatttatttttatatgagttttgaatatctagtgtaagaattgatgtcctggatagataaacaataaggaaggtgctaaggaaaaatattcttcctgaacttggaaaagctgacatgctcactggaaagaggaagcattcttaacaagccaaacccaagggtcatataaattttctggaagcaatgacaaaccctacccatgaccttatcgtatgcatccctgtcatgcacataagtgccctttccttaatactcttatgaaatcacaatatctattttctgacactaccaatagttacaatggacagattcaagggagatgaggaaatttgaaagtcctagaagagggtctagcatctgtggtagaggattcaagtggtgtctttatcagagaacaggaatagtctccattagttctccaactactactttctatctcgaacataatagttctgtaacaacaattgctaatataggatttctcagtggaagcagagaatgtaaatactctaggaatacaagggaaattaaaatgagctggagagtaagaagaagtagattaaacacaggcagtaggcaagaggtagtgggaagtttgaatatcttctttatgattatattccttttagtgtcttcgattgcttccttacagctatgatactgaatcctatgcatcccagcatgtttttcaatgctgcttttctgaattatacttctatgtcaggggcaaaattaggtttctcagttggcatcactgatctccataagaatgctcagagtaggggaacattcttaagatgctcatatggtaatgataagaaatgttccatgcaggaaatctccctgcaagtctatcatccagccttcttctaggtccactatcaatgtgaactagcatagtggcccatcaccagaaacttctcatgtaatccgtagatagtttgaagtgacccagtgtgaaaaggtgaaacagaaatgccagtgtagcaacatttatctctagaatgaggtagaagagggaaatgtaaaataaaaagactttcttatgaagtaagcctatttaatgaataagaatacctgagagagaaataataagatatggtcaagatttgagacacaatcccaaaatacaaaacccataaatgttttctaaacttacattttcaacaaatgtccactttcctttagaccattcctattcttttctcccatcaccctaggtgaactctaagaaggaactgtcttcttcatacatcagctgcaccagtgatccccaggcctacggctaacaccattatgctttgtttagggagctctgtgggtactggttagttcatattgttgttcctcctatggggctgcaaaacccttcagctccttgggtactttctctaactccttcattggggaccctgtgcttcatccaatggatcatttatttttatttttgtgctaaactttcactcaaatctgtgttttgaagttgttaaataaatatcttatgaacttcatataaagttagaatcatttgtttcattttgatttcaatatttatgggtagctttaaaatctccaaaatttggttttgtatatttaaaataacaaatgaaatatccatgtatgtatatacatattcatatggttatcttttttcatctacccagtatcttttctatttgactgtactggatacatatatatatccattgtttgccataaatctttttaaattatactttggaataattttaaattataaaatttgtgagaatttcaggttatttgtggagagagtccctttcatggttttacagtcactgttacattgtacagctagggtcaattctggaccttctagtacaccttcacaacatactatgttcattttagtttaattaacaatttctttagtcaatttatgtcttgacaacagccctccccttctcctagtcctacccttactaatacattacctcatgagtccttcacttctcttcagaaaccaggaacaccttgagcatcaatttgtcctaggatggaaatttcccatggaataagttcctttgggccagttattggttgggcgtttcctcaagctctgctccatgtttatccctgcacatatggaaggcaggacaagttttgaattgaacattttgtggatggtttaatgttccctccctccacttgcagtcccccctggctataggaggaggccacttcagtttccatacacccaactattatgtttctcagtgagggttaaccccatatactcctaggaatctccttatcttcccgggtctcgagatagttccagagatgcccctgccccaatttgtattctttctcccagccctctctgctccccctctccaaacctaatcccaatccccgttcaccttcttacctcaactcccaactagatccttccctccaacaacctccaatgactattttgtttcctgttctgagcgacattcaagcatcttctcttgggccctccttattactcaatttctttgagtctgtggattgtagcatgattatcctgaactttatgtctaatgtccacaaataagtgtgtacacactatacatgtctttctggtctgcgttacctcactcaggttgataatctcaacttccatccacgtgcctacaaattttatgatgtctttctttttgatagctgaatagtattccattttgtaaaagtgtgtagaaaatataccacattttctttatacattcttttgtgagggacattgaggttgtttccagtttctggttattacaattaaagttgctatgaatgtagttgagcatgtgtccttgtggtatggtgaggtatctttgaggtctatgcccaggagtggcatagatggatagaactattcttaatgttttgccaaattgatttccaaagtgattatacaaatttgcacccttaccagcaaaccagtagtcttccccttttctacatttttgccagcacgtgctgtcacttgaggttttgatcttctacagacactaagagaacacaaatgccagcccaggatactatatccagccaaactttcaattaccataaatggagaaaccaaagtattccatgacaaaaccaaattcacacattatctttccatgaatccagcccttcaaaggataataacagaaaaaaaagaaaaacaatacaaggacaaaaaccaaaccctagaaaaagcaagaaagtaatccctcaacaaaccaaaaagaagacagccacaaaaacagaatgccaactctaaaaacaaaaataatacgaagcaacaattacttttccttaatatctcttaatatcaatggactcaattccccaataaaaagaatttatcacttttaatcaattaacttacacctacaatttttaatctgctcagttcttactaatttttagacttccagatgaatattaagaaatctctatacaagtgaggtttttccaaattgattctaagtacactcatatttatttttcttaactaaatagttttatcttccttaactgatgggtaataatactttacaaactatgtcatagcataatttgtgccccaatgttgccattgtttgcttatgcttcccagaacagagtgtctggaagagggtgtggatggttcaaacttcactcacacctgaggtaaagcaggtcggctaacgggaaagaggtaatgtttatgagaattcttagttcttatcagaagagtagcctgttctttcttggaaactctttgagtctgtgccaaatgctgcccaccatccttaactggatcaatgttccagttatttactacgatgtccctccctcaaattctgttataaaaacacagtcatctctgtcctgacacaccatccagatctctggaagacaggtaagggtgaactgaaagatgctgaaaggtaggcatgggttcttctctcacacacaggacaggtgtctgtgtcctcagacaacacagagttttgtaacttgaggtatttaggaagttctcagggagaggaaaaaacatcaatttccacttaattcctgtatcacaggagaaagacaggatgatataattttcccttgagagttaatcaaagaaggggagggacggttctctctgaatgtcctcactaaccacacaacctagagttattctggctattcctccctcacagacaagatgctgcctccaacagcctgctccgtcatgtcctggatgctgctctcctgcctgatgctcttatctcaggttcaaggtaagacctctctgcatgtagcaatgatcccttgaaagtgtttcaagataggaaagtttcatgttgtaattaggaggaaaaattcacacaagtaaactgcctgcaactttccagcctttcttcaggtcattagttatagaagatatcagacgggtcatctctgtggaaagacaagatttctcatgttgtcagaattttgtaatttattcttccaagattaaaggggaaaatatgatggttaatatgaactgtatagaagaggaaagatggacaggtgtatttaagcctctctgcccagtgttggtagagtcatgaactaatgtgtagaaaagaagagaaaaatgatgctatcccatttactatgtctgttcatcataattttttccaaagactattagaaagcttgatattgattttcttccaaaagataatctacaaaaatattcctactttaacctttcatctaaatctcactactcatctcaccccatcgctctatttatctcactccaccccaggtgaagactccctgaagaatataccctccgcacgcattagttgccccaagggctcccaggcttatggctcctactgctatgccttgtttcagataccacagacctggtttgatgcagaagtaagtgctgggaaggagaaggtacacaaggaacacacggaaatgttaggttctatcctccctaattccttccatctgagaatagctgactttaaaaataacctctcctcttgcttacctatgtcttccagtgaagtctaaatctccttttcattttgattctcacatagctggcctgccaaaagaggcctggaggacacctcgtatctgtgctcaatagcgctgaggcttcattcttgtcctccatggtgaagagaacaggaaacagctaccaatacacttggattgggctccatgaccccactctggtatggtaacctcttctctgtttcctctcaatgatcgtatcatgggggaatacattatctatgcgtccccagagtgaacctggaaagacagagatcagaccccgcatgatattgggaccagggaaaccatcaggagcagttgtcaagctgagctctatgaatgtcttagacttcagatgaagtttatgtgttaattattgacttttacagaggtctatgtgaggatttggaattattctcatttagtttcagggagcaaacacacaaccagtcaagaggcacagaaataaagaggcaatttacattttctcttaatagaataaccaccttccttccattttaaaggaaattgctgatttagcactatttatattttgaatacatttcaggggatattaattccatcagtagtttctgtgtttataaatagacatgaagacaagaataatttctattggtgtgctcttgaaagctgcatatgatcacccaagttctgggaggctgggagggaatgaagggtttcattcacagttgcacacatgcagagctttggacccttcctttcatctgcatacttcctcactagggtgcagaacccaatggaggtggatgggaatggagtaacaatgacgtgatgaattactttaactgggagaggaacccatctactgccttagaccgtgctttctgtggcagcttgtcaagagcttctggtaagaaggagaagatctgtgtagcctaaatgcatgcccctcttctcacatccctgggtgcctctgacctaggaaattgaatgtgttcttgctttctctcatctcctttcttgatgtcctgggtgtctccttcccctagattctaacactggtgaacatgggggagcgactttgaaattgaggccatacattgaggtgtttcttctttaagttacccaagattctgagtgctcaaaagcttcgttcccttttctttccaggatttctaaaatggagagatatgacatgtgaggtgaagttgccctatgtctgcaaatttactggttaaacttatcagacagcaaacatcccgaatttgtcttgaagagcatcatggacaagggacaaaatgtgaagactcacctagaaaaagcattttctatctacagtccacattagagccttaatctgctctttccatatctgtctttagtccttttggtataagtttgggctcaattctaaaataaaaataagctttctgtcacactttgagtttttgcattctattaatattattgtctgtgaatgcatgtgagcatgtatgaatgtaacagaattcttatggagatcagaggataacttattggaatcagttgttgctatctatctattgagaaagggactctcatatttttgctacaaagtaaattaagaagaatttgttgatggcataatccacctagcatccacctaattttaagtaagttccctgagagcaaatcaactctatttctggcttaagaaacaaatttttgatccatcaatccaatgtgctagcactgtgcataatttttaattgaattctttttcatgcaaagtattttgattatagttttccagagtattcttacaagtgtagaaacacaagctgttgaactccatagtggttcaaatacagttagaataatggaaataagcacaactattaaagaaacatctttattttcaacaaatttcaaataatgttttatgtacaaccatcagaacatattataaattgcttttgatagctcatgtaaatatcatgatcataagatcaaactcagatgtgttgtggaccacagtataatgtaagatctttaaatatgattgtgctgagaagtgtatacaagaaggctaactagaggtatccagtacttgcctgcttgtctacaaggcagaatcaagatgagtcctgattgttgaaactgaaatttaccagtagacagaatgacagttagaaaaacagagacttcatcccagtgaatctgaggaggaaatagtgtccaaagaactgagtaagtagcatcaaggaagaatgaaatgagggactgggtcttcctttaatggttagttatattgttaatgtgccgcagtgtggaatcaagtatgaggagagtctctatgaggaataagttacctcaggctggtctgtgggagtatctgtgggagattgtcttgatagttaattgatatattaagacccatcccatttcatttggcatcattctttaagtaagtacacctaaacgttttagctgagcacaaggtagcaggcacactttcatttctttctgctcttgaccatatggtgcaactatctgtctggagctattgctactaggtctaaatcccaatgatgaactctggctaggagcagaagctgaaataagtctcttctcaccatgctgcatttttttccaggatgttttatcacaggaataggaatgtaactagaactctggctaaagatgagacaggacagtcactgtgagccagagcttcccaggaaaaagcaaattcagaaatcgtataagtggactatggaggtgatctggcattagacaacatctttggtcccacctataaatccataggatgccgaactgggggacaacttaagggggggggtgaacttacttgagttcagagcttctgagttgaatggtatgatcagatctgatcagatcagatcactgcactgacatagagggtggctccttcagagtcattttgaccagggaaagatagacacaaatcaaccaggaattatacgttggaagaatgcaaactcccattagcaagaaaatggaacatctgctagtctaattttcttggtctaaagtactgattagtgttacttaactttgcattggagccaaatgtaagaatatcagggttatgagggaaagattgataagaacctgatccttgtcctgtcgcttcatgaatctctgaccttggaacactcaacaaagctgtcttttatgatacctgccctgggagtgtgaaacaaaacgtgaagagaatctatagggaatttcatatttatagtagctccttgatgtgtagaattccttgtgtgactgcgagctctgctcgcccagtcagtgtaggatgaactcattctcacacttagtatctttttttcttcacttctttacctttctcatgacaccatttttcccatttaaattgagattttctggttttaagaaagttcaaagctgtttatctgtacccttttggtagttacatggaagtaattatttaaacaataatttaaaaaaggttgattgttcaagtagattgcattttgctaaaaataatacttcaaagatgatatttgcagagaatggcttaagtaacatcagactctatgtgtcccaacatgaatgacatatataaacaatcagtgtgaagcgagggcaatgccttcatttgttcacattatcttccaaaagccctgtccacaagttcatcatagtatgccagtagattagccgttagacactgtttcatagaacaatggttagaactggaatctcccttagcacttccttgcggttcctttggtaactactctgcatgacttcatgtcttattgtaaaaatggagcacaatatcacaaagtattgactaaattttattattgttctccgaatccttaggccagagtccccagagaatacacttatggaagaacagcagagatgagatgaggaattcggtgtcggggtgtgagaaggactttcttggtgagccatcatgcttgctcctttgtctatgtgatcttcaggatactttcaggcagttgaaatcagaactggcctaacccttgaatttgcagacatagggaaatattgtgtcacaataataatctctccacttctgataacctgcagagagacaagaggtaaagggaatgggtctggtaaatttgtggttgtaaagaaagaacaactcaatcctctgctctggacttagacttctgcatgctcttcatttttgcatctttaagggaagaagacacagaaggaaccataagaaatgactgatcactattctacagtgcatttgccagcttatggctgtaccttggaggtcaacatagatgtggtaaatgggtttagttagagaaggcttttctctctcttacctgaggcctgagacaaagctgcacagtagccgtggtgtgcagacatggagggtggtatctcccagttatagaaggtcagagggtcagagctgctccacttccatccattttcattgggcaaactcccctgaatgtgggaagcagtgtgcagcaaaggttcattaacactgcatgaaaacgtcactgaaatacctgatttcctgcttattgtccttaaacattttatgatcatacacagttgctttggggggtagattaatatttgggaatttcttaatcctatttacaaactccattaattataggatgaaattagggttactgaaatgtatctcatctttgtaagttcaaccagtgttacatttgagagttcttcagacacgtgtggacaaaatctattctataaagaaattacagatgtaattctgacagcatttcctgacaattttatgtgcagactttctgaggctgaagaaaaattcatccaaggtctcaataataacagtaaaagtcaacaacagtgatatgaactttgtgtgaaatctcagacatctacaaagctcagctcttcagctgtagttccccttgttctaatgctacacagcactgaagatctaacacccatttggttcttcatggggagttcgaggtactcttccacagggacaaaaggcactaaggggaacaatcaaggcaaagataggaacccacaagtgacagatcatggagtccaatccagatgtatgggaatgtggtcaaactgtttttcaccagagaggacacaaagataatttcaccataagtgagcagaaatgccaggtgtcctgagaaatgcttctggcagtggatctgtgtgaagaacagaatgagagagagagactgaaaccttactagaaaatggcaaataatatgtgatggattgtatacctctcactcagctataccatagagattgaaacccagcactccttgacccacaagtattttgtcctattgctcccaactctgcctgtcttcacttacctctgcattagcccaggtctgtggttccagaatcagtaaatagcaataggagccataagcttgggcttcttggggacagctgatgcgtggagaagacagttttttctgggattgttcacctggtttaaagggtgatatagtcagtgatggagtgaatgtgagagtggagtggagagaaggaggtcaacataaaaatgactcctcaaccttatttgagattatgactgtaatactgagtgcttcctcttagtattttcctagttgttgattttgactatgtctgcatgtgtatggggtgagcatatatgtgctgggctatacatgaggatatggacatgatgccagaggtcatttcttggtctgtatttatattggacttttaaaagggggtttcttgctggctttgtccagtttataattttgctagattggccatccagtgatacccatacaaattcctctcttgtcctcctcagaatttggattatggccacctaccaccttgtcaagtttaatttacatgggttctaggcattcaacttggcttctcatgcttgcttaacaagcacttcactagctgagatatcgtatacccaacattaggttcttaatttaacaagacattttaatgtggagaagcgtgcctttttaattttaccctgtcttcatactcatttattctcccttctctgggataacagatggagggctttatattctgtcctctgtgtccttccttagagttcattactgacctgtaagctttcttttttcaaccttccaagatagttagagtttgctgatgacacgggggaaactttcattctataacagtgaaacactgtggtatatctcccctcttccaatgatccagaggaaggaaggatgtggaagatttttctgtgtggattctcctcatacttaacacacgagactctccagattccttctctctccttggttctcaatattcatggggaacccagtgctagacacacaacaactttaccttgtacccaagaaagggacatcaggcaacacagtagcatccaggacatgctatgaagggtcttgtgagacaccatggtatatctgtgaggtaaaaggagtaagcccctgaagagagtgtggttagaagtgacataaaaggagaccacaatcactttcattattatttatatagctctgcaaggaaaaaaaatctaatttcagtctgatccccctgttttctctggttccggagaaaaatggaagggacatgctcatctttcagttcctagtttttctgagttttagagatttgccttgtgaggtcagagaaagttctccatctactactgcagtgtgggagacaaatacctgccagccttgcattgtctattagctccacttacctgtctatacagaggtctgcaatgctttgacagcacagaggtgatttcacttttaaaacgacatctgaagtagggccatgcaagtgaagaagtgccagctcctgctgctctctgtagtgggtagtgcttggcacaggttacagaagatttcccataagaatacaggactactcagggcagagagtgagaactgccacacatgttcctttcctgttaatctagctctgacctcaggtgctgattaggtttgaaaatggctaccctctaccaggtgtcagattctgggaaacttaagtaatcacaggcagtctcctgctaccgaatatgcagttttataaaaataattacaatttataaaacttacagtctttatttttaaaagaattgtctctatttgtgtaaaaccaagaatgcgtctttagttgtactgaagaacttacttctgtagatacatgaacatcatctcataagattttaggtatatcaaaagtgctgagttttgtgtgttaaaatttgattttttgagtggtgtagaacaagtgtacaatacaaagtaaaattacctgttcaatggctacttcaacattttgatagcagtacataaagtgtaaagcaaccagtgagacaacattttagccaggattttaaggaactgaatagatttgcttcttagctaactccatgtataaacagagagagagagagagagagagagagagagagagaggagagagagagagagagagagagagagagagagagagagagagagagagagagagagagtttgctggtacttattcagctctcagttatatttcagaatagcatacttagctagtccgaggagcctgaggctcagaacaaagtcacacaggagcagaggtctgtggcaatagaggggttactcttccatcggagcttctccagttccacagtccacttcttatggtcacatattcataaggattccaagagtcttctttcagaaatgattcaagcttttttcttttataatttcttttataatctgttctttaaatatgcccatgcatgtgtctatgtgtaggtttatgtgagtatgtgtatcattgtgagagaacatacatgttcctataggtgctcaagaagactaaaacagggaatcataccacctggagatggttatgaattgcctgatttgtgtggtaggtaccaaagcagtacctgttaacccatgtctccagcctcctaagttctatatgttaaatggtattagctgttctcattgtgcttacatttgtacccatagaggcaaagaaagatggctaaaaaaatgtaattctttaatgttaaatgggtcagtatcatcagcatgtgtcaattacatatttgcatttgcatttggcagaatactctatttttctaaatggccttgcacttggtgattcgatggaataaataattgaagtaaagacttgcctttaagcacatcttatcacagtctgtatggctgtgtgcgaagtttaaatttgaaactcagtggtcacaatatctaagactaaatgctgctcagttgtgttgtaagtcacaattttcatgcatttaaaaaattgagaagacaaagaaacttcagtggttcatctataggaaatatggtcatatattccaaagaaataatgcctgtgaaggagaaaatattttaaatgttgccattttactatcaacattgcagaatttcaaacatcactggcacctgaacacagaacatgtttgctaataggaaatagccccaatgtgtgttagtttctgtctttgccaggaagtgtcctgcaagttttgctgggaagttttctgaatgtatgccaagcactagctatcacccagacttaaataagcattcacttaatcactttgatgcccttccttcaaatcctatcataaagcagtcacctttgtcctgacaaaccatctcagatctctacaagagaggtaagtgggagctgaatgatggtgagagccttgtgtctcttactatagagcgaagatacagaagaatctctgtcttcacattaattagggctcttagaaatagcaaagtcttccccagtcattttctgggcaaggaaaaacattggattcttcatttcattccagaccaatccaaagctgtgatggagctgagactactgtagccctttagatctaggcaaaagtgaagggagggatggccatctttgcttgttctgtctactacactctctctggtgccctgtttgttgttctctcaaagacaagatgctgcctcacctggtcctcaacagtatttcctggatgctgctctcctgcctgttgtttgtatttcaggtacaaggtaagtcttctctgacctagtctgtaattgtccatgagcgataagtgatgagaagcaaagaagtgttcttagaattcctgtgtggtaattgtgagggatatccacacaggaaagtcacctacacttcatccatcctcttgccttcttctatgttgctggtgggaaaaaagtatcatggtattccatcattccctgagtgagagggtttctatttgccaggaggctctcaattatgatagtaagcatgtaggagaggagaagaaatatgtgagtcactaatgaagcatgcaagtagaccttggggagaatggagtatcacagacagtgaaatgtgtagaaagagtaaaatgaaaggaagctctttcacactatatatatatatttaaatgtggcacctagctaagtatagtacctagctaaatacataacttgaaaaccagcattcagggaggagtttcaggaggatacctctgagttcaaggccaacttcatctgcacagtaaattccaggacattcaggcctgcagagaaactttgtcacaaaggaagcagaagcaaacattcaagcaacaggatcacaagatggaaagcttagtgaggctgtcaccaccttaattgtagccacccactctacaaaaaatgtcctttataaacattcccttgagtgttcctccccattcaattcccattctcggtgtcatgacatccctctcattatctctctccaccccaggtgaagacttccagaaggaagtgccctctccacgtaccagctgccccatgggttacaaggcttatcgctcccactgctatgccttagttatgacacctaaatcctggtttcaagcagatgtgagtggtaaagggtggggttgaagataccagcacaaagtgcaagtaggtaacaggagagtagggctcatgtttccatggttccatggggggggagcgagtgggtcacaatattggttcttcctttttttttctgtaatctttttgctcatggacatctggagtatcagtctttctcgccttctgtccctcatgtagctggtctgccagaagagaccctcaggacatctcgtgtctattcttagtggaggtgaggcttcctttgtgtcctccttggtgaacggcagagtggacaactaccaagacatctggattgggctccatgatccaacaatggtgagattctatttttctctgtttgttctctaggagctaatgtctcccaaacacaattttctgtgtgttctctctgtgtataatgtaaggtggatctagcactcaagctgggtgacattagagtaaggaatatcctcaacactggggtgaaaggctgaattatatagaggttcctcatattcagcttaatttgtttgcctattgtcagcttttacatttttcttttatttaagaaagtccacgagtgacttctttcttttgtcttcaaggaaccttcacaaaaagtactgagagcattgtaaattaagatttacatttattcattgaaaaaatagatatattcattttatttgtatgttttctctaaatgtatgtgtgtgcatgatgtgcttgcctgatacttgaagcagtcagaaatgagcttcagatcccttaggactagagccatagattgttatgatcctctatgtgggtgctggaagccaatccttaggagcaggccatattcttacctgctgagctatctctctgccgtctacttttgttgtttattgagacgatactgtgagatcaagaggctattctgcaatgtatcattcattactcattgtgtagcaaggaccttgttactccagttcttgtgattattggcaaggaggaacctgtaggagatagatatcaggtcagaacttccaagtgaaaaggtgcctgaacagcatggtagaattgactaaattccatgaatctctctctctctctctctctctctctctctctctctctctctctctctttctctcatcatacctctactgtgtagggtcaacaacccaatggaggtggatgggagtggagtaactccgatgtgctgaattatcttaactgggatggggatccttcctctactgtcaaccgtggtcactgtgggagtctgacagcaagttcaggtaagaaatggaggaagagccatctttgcccaagatattcacacattctctctaccacagagtctgacctcactattatctcctgaactagggaaagcagtatgaatttgtgtccttctaactttcatgtctctacctagggaatgagttcagctgaatgaaa

SEQ ID NO: 227 - DNA, 759 bp, Mus musculus
acaccatccagatctctggaagacagacaagatgctgcctccaacagcctgctccgtcatgtcctggatgctgctctcctgcctgatgctcttatctcaggttcaaggtgaagactccctgaagaatataccctccgcacgcattagttgccccaagggctcccaggcttatggctcctactgctatgccttgtttcagataccacagacctggtttgatgcagaactggcctgccaaaagaggcctggaggacacctcgtatctgtgctcaatagcgctgaggcttcattcttgtcctccatggtgaagagaacaggaaacagctaccaatacacttggattgggctccatgaccccactctgggtgcagaacccaatggaggtggatgggaatggagtaacaatgacgtgatgaattactttaactgggagaggaacccatctactgccttagaccgtgctttctgtggcagcttgtcaagagcttctggatttctaaaatggagagatatgacatgtgaggtgaagttgccctatgtctgcaaatttactggttaaacttatcagacagcaaacatcccgaatttgtcttgaagagcatcatggacaagggacaaaatgtgaagactcacctagaaaaagcattttctatctacagtccacattagagccttaatctgctctttccatatctgtctttagtccttttggtataagtttgggctcaattctaaaataaaaataagctttctgtcaca

SEQ ID NO: 228 - protein, 175 aa, Mus musculus
MLPPTACSVMSWMLLSCLMLLSQVQGEDSLKNIPSARISCPKGSQAYGSYCYALFQIPQTWFDAELACQKRPGGHLVSVLNSAEASFLSSMVKRTGNSYQYTWIGLHDPTLGAEPNGGGWEWSNNDVMNYFNWERNPSTALDRAFCGSLSRASGFLKWRDMTCEVKLPYVCKFTG

SEQ ID NO: 229 - DNA, 22749 bp, Homo sapiens
ccttagaattggaagaaaagaccaggcacctgttggccagttaaaaacgattagcacggccaccggacttaaaactcaggtgtgaggctgtctggggaagggctttctaacaacccccaactcttctgggttgggagcattcatctgcctagaaccagcttccgctttcacttttcttggggaagccaagggccgactagaggcagaaagctgtcatcctgaactcccggcattagcaggttgagatcacggcacagcccgaagtctctattcaacagttgcccatgcgtacacccctacctttccttctgacccatatctcctgggtcctgaccatgactttcttgaaagtgtagccccaaaattcttacctctgaatgtacttcctctgatccccgcctcctaggtactaatggttcagactttaatttcctcgcaagttgtgtctccaaagggatctagggaagctctatgctgcatccttaggcatctaggctataaatgcagggagtcttgtgtccctcgtgtccctcccaatttaggcataccgctctcgacacgggcagttatgtgggacctgttccccaccactcttgccaggaccccaagtttgtaaatggctaaaagagacagagagagagagagagagagagagaggcagagaggtgaaagaggcagagaggagaaagaggcagagaggagaaagaggaagagagacaaagagggactcaaagagagaaagaaagagagatagaaatagtaaaaaaaaaaaaaaaaaaaaaaaaaaaaaaaaaaaaaaaaaaaaaaagtgggccctattcctttaaaagccagggtaaatttaaaacctataattgataattgaaggtcttcttcatgaccctataacactccaatactacccttgttgtcagtgtaaacaaaggcatagcctgaaaacactgagaccactgacaaccatagccttcctatcaaaaatccttaacccggtaacccgtggatgacccaaatgcattcaatctgtagcggcaactgctttgctaacagaagaaagtagaaaagtaacttagaggaaacctcactgtgagcacacctcaccagttcagaattattctaagtcaaaaaagcaaaaaggtagcttactaactcaaaaatcgtaaagtatggggctattctgttagaaaaaggtaatttaacactaaccactggtaagtcccttaacccaacagatttccttacaggagatttaaatcttaattactatacaaaggtccgaccagaccgaggaggaactcccttcaggacaggacgatagatgtttcctcccaggtgactgaggaaaaaaccacaatgggtattcagtaattgatagggagactcttgtggaagcagagttagaaaaactgcctaataattggtctgctcaaacgtgcgagctgtttgcactcagctaagccttaaactacttacagaatcacaaaagactatctcaatcctgactcaaaaagttcgctacaccctttctgaaatgaatttgcataagaactgttgtttatgggaatgcatcttgatggggcagctgggttgttatgaaatactcaggaacccagcccagctctaggactcacccctgagcacaaaggcaatgttaggcatgctggtaaaggaccactagaatccagcagcccgaacccctttctttgtggtcaagaaaggcggtaaaaggggtgtaggaccactacatcggtgagcgtaactagtctgataagcagaggtccatgggtggttacgtgccctggaaaggaataagcattaggaccacagaggacgctctaggactaatgttcttcagaaaatgactaggggtgctggcatccctatgttcttttttcaggtagcaaacattcccctcaaggcaaaaacaccccgaagatgtattctggagaatcgggaccaatttgaccctcagacgctgagaaagaaatgacttatattcttctgcagtattgcctggccacaatatcctcttcatgggggagaaacgtggcctcctgagggaagtataaattatgacaccatcttacagctagacctcttttgtagaaaagaaggcaaatggagtgaagcgccatatgtacaaattttcttttcattaagagacaactcgctattatgtaaaaagtgtgatttatcccctacaagaagccctcagagtgtaccttcctaccccagcatcccccctactccttccccaactaataaggaccccccttcaacccaaatagtccaaaaggagatagacaaaagggtaaacaatgaatcaaagagtgccaatattctccgattatgcccactccaaacagtgggaggaggagaattcggcccagccagagtgcatgtaccattttctctctcagtcttaaagcaaattgaaatagacctaggtaaattctcagctaaccctgatggctatattgatgttttacaagggttaggacaatcctttgatctgacatggagagatataatgttactgttaaatcagacactaaccccaaatgagagaagtgccgccataactgcagcccgagagtttggcgatctctggtatctcagtcaggtccatcataggatgaaaacagaggaaagagaacgattccccacaggccagcaggcagttcccagtgtagaccctcatagggacacagaatcagaacatggagaatggtgcagcagacatttgctaacttgcgtgctagaaggactaaggaaaactaggaagaagcctatgaattattcaatgatgtccagtataacaaagggaaaggaagaaaatcctactgcctttctggaaagactaagggaggcattgaggaggaaaacctgtctgtcacctgactcttttgaaggccaactaatcttaaaggaaaagtttatcactcagtcagctgcagacattagaaaaaaacttcaaaagtcagccttaggcctggagcaaaacttagaaaccctactgaacttggcaacctcggtttttttataatagagatcaggaggagcaggcggaatgggacaaacgggataaaaaaaaggccaccgctttagttatagccctcaggcaagtggactttggaggctctggaaaagggaaatgctgagcaaattgggtgcctaatagggcttgcttccagtgcagtctacaaggacattttaaaaaagattatccaagtacaaataagccaccccctcgtccatgcccgttatatcaagggaatcactggaaggcccagggccccgggggatgaaggtcctctgagtcagaagccactaaccagatgatccaacagcaggactgagggttcccggggcaagcaccagcccatgccatcaccctcatagagccctgggtatgcttgacctttgagggccaggaggttaactgtctcctggacactggcacggccttctcagtcttactgttctgtcctggacaactgtcctccagatctgtcactatccgaggggtcctaggacagccagtcactagatacttctcccaggcactaagttatgactggggaactttactcatttcacatgcttttctaattatgcctgaaagccccactcccttgttagtgagagaaattctagcaaaagcaggggccattacacacctgaacataggagaaggaacacccgtttgttgtcccctgcttgaggaaggaattaatcctgaagtctgggcaacagaaggacagtatggatgagcaaagaatgccatcctgttcaagttaaactaaaggattctgcctcctttccctaccaaaggcagtaccccttagacccaaggcccaacaaggactccaaaagattgttaaggaccgaaaagcccaaggcctagtaaaaccatgcaatagcccttgcaatattccaattttaggagtacagaaacccagtggacagtggaggttagtgcaagatctcaggattatcgattaggctgttgttcctctatatccagctgtacctaacccttataccctgctttcccaaataccagaggaagcagagtggtttacagtcctggaccttaaggatgtctttttctgcatccctgtacattctgactctcaatttttatttgcctttgaagatccttcgaacccaatgtctcaactcacctggactgttttaccccaggggttcagagatagcccccatctatttggccaggcattagcccaagacttgagccaattctcatacctggacactcttgtcctttggtacatggatgatttacttttagccacccattcagaagccttgtgccatcaagccacccaagcactcttaaatttcctcgctacctgtggctacaagattccaaaccaaaggctcagctctgctcacagaagtttaaatacttagggctaaaattatccaaaggtaccagggccctcagtggggaacatatgcagcctatactggcttgtcctcatcccaaaaccctaagcaactaagagggttccttggcataacaggtttctgccaaatatggattcccaggtatggcaaaatagccagatcattatatacactaattaaggaaactcagaaagccaatacccatttagtaaggtggacacctgaagcacaagcagctttccaggctctaaagaaggctctaacccaagttccagtgttacgcttgccaaaggggcaagatttttctttaaatgtcacagaaaaaaacagaaatagctctaggagtccttacacaggtccgagggatgaacttgccaactgtggcatacctgagtaaggaaattgatgcagtggcaaagggttggcctcattgtttatgggtagtggcagcggtagcagtcttagtatctgaagcagttaaaataatacatggaagagatcttactgtgtggacatctcatgatgtgaacggcatactcactgctaaaggagacttgtggctgtcagacgatcgtttacttaaacatcaggctctattacttgaagggcctgtgctgcaactgcgcgcctttgcaactcttaacccagccacatttcttccagacaatgaagaaaagatagaacataactgtcaacaagtaattgctcaaacctaccccgctcgaggggaccttttagaggttcccttgactgattccgaccttaacttgtatactgatggaagttcctttgtagaaaaaggaccttgaaaagtggtcagggataatggaatacttgaaaataatcccctcactccaggaactagtgctcagccggcataactaatagccctcactcgagcactagaattaggagaaggaaaaagggtaaatatacatatagactctaagtatgcttacctagtcctccatgcccatgcagcaatatggagagaaagggaattcctaacttctgagggaaaacctatcaaccatcaggaagccattaggagattattattggctgtacagaaacccaaagaggtggcagtcttacactgctagggtcatcagagaagaaaggaaagggaaatagaagggaaccaccaagcagatattgaagccaaaagagctgcaagacaggaccctccatcagaaatgcttatagagggacccctagtgtggggtaaccccctccaggaaaccaagccccagtactcagcaggatgaatagaatggggaacctcatgaggacatactttcctcccctgaggatggctagccaccaaagaaggaaaaatacttttgcctgcagctaaccaatggaaattacttaaaacccttcaccaaaactttcacttagacattgatagcacccatcagatggccaaattattatttactggaccaggccttttcaaaactatcaagcagatagtcagggcctgtgaagtgtgccaaagaaataacccctgcactgcaggccatacctttcaatccctgtacctttaacctccttgttaagtttgtctcttccagaatcgaagctgtaaaactacaaatggttcttcaaatggagccccagatgcagtccatgactaagatctactgcagacccctggactggcctgctagcctcatgctccaatgttaatgacattgaaggcaactctcccgaggaaatctcaactgcacaacccctactacaccccagttcagcaggaagcagttagagcaatcattggccaacctccccaacagcacttgggttttcctgttgagaggggggactgagagcaggactagctggatttcctaggctgactaagaatccctaagcctagctgggaaggtgactgcacccacctttaaacacggggcttgcaacttagttcacacctgaccaatcaagtagtaaagagagctcactaaaatgctaattaggcaaaaacaggaggtaaagaaatagccaatcatctatcacctgagagcacagcgtgggggacaatgatcaggatataaacccaggcatttgagccagcaatggctaccctctttgggtcccctccctttgtatgggagctctgtttacactctattaaaccttgcaactgcaaaatatatatatatatatgaaaaataattataaaattggtaatggagaagcatggaaataagtgggactgaggaataacataaatggactactatttatttatcattttattaatattattttttaaaataatattaattattattatttataattttattatatttatcattttattaatgatattatttattatatcatttattatttatcattttattaatcattaatattaatgtattatttatcattttattaatattaatttgattgtattacttctttttgcttcatttctctaaaaaataaagctaaaaaagatggcaagatattatcgctgtagattctagatggtcaacctatacttgtttgttaaatgttttctgtatgataaagataatttattacaaaaagaaaagcaacatgactatggaattatttcttatttttatttttatttgctaccacaagaaatgtgaactctgatacattgtgaacagttcagatctgcaaaattatcacccacaagctgtttgagtatgatttatggtaattaattgaaaacattatcttaattttttcccaaatgaacattttgtattataactagcttattctaaaagaaaaatcaataaaaagcaatagcctttttaaaatacccaaatagataacgttagaagagcaaacatgatatgaacagggaactcttccaagatcaatgtgaaaatttgaaaccaaataaatattaacacagttttctgataaaaattattgcctccaataactgcacaggtcatatgatagttactgttcatggcttacgtataattgaccaaatttcagtagctatgttatcagctttccagttctttgatgttaataacttccctcattggcctcaggggctttgaagttttgtccctttttcctgttttatagttgctcagcacctaatcttatccctttcccaattcttctgacagtgttaggataagatgaaaggaccaaagtggcattctggacatctggttaatatatctcaaaggggtgcactttagtgataaatctccagtgagatacagttcaaggctatttttgacatggaccctgctgagccatcttccaggaaacctctacattttaccatccttgaaacaaatatattaggctcctgcaaagagatcagttttcacttttataattctaagaatgactactaagtcttatctgcaaatatctgattcagaagataatagggataaaagtacaaattggacatcttttggcaaaggaagctccttaaaactcagccttggttacatcaagaataagaattcctgtgtcatccctaagaagtagatttttatataactcaaaaccagctcaagaaatataatatttaaacaaacttctcagtgcttggttaataagcattgttatgaagaaacaatgaaaaataaaacaaaaacaactcaactttagtgagtttagtgagtgtcattgcaaagaaaatttcacattgcacttagggattttataaccttaaggcttattacaaaggtcacactatttcaattaagaacaaaagtgagttttaataataaactgtcagcatttcaaatcttctctcctaggtatcttgaaatatacaacatattgttgttaactatagtcaccctatgtgctatcaaaagctagaacatattcctcctatctagctgtatgtttgtacgatgaactaaactcttttcatctcccctcacccgtctcagcctctggtaactattctaccctctggttaccttctaccccgtacctccatgtgtttacatattgttgtataaattttgtggaaaaaaatcctttttaacaaaataatctgctggctatatttcttctcatattatttgaggaattgcattgaattttgggtactgaattttgaggacgtgaattaaggatgagctacatctcatgacctcgtcacagacccctactataaacatctgcatacaagttggcatattacaacaatagcatgagagtcagggtctgtagaaattcccagcctaactttttcctggactggccaaactgaacctgaaccagtgtatgggcaatgtagtatgcttgtcagaggcaccaaactgctaactcaaaaataaacatgactaaaagaacttctcccagtatacccatatgaagctgaccatttgcccagtaagaatgcaatgaaaagggcttttaatgtacagccaaatggcagtccagcaaggaagctcatgagcaacctacaagtagtgagcattttgatgtaatagagacttacatgcaattcagaattatgtttacaacatcacaaaacaaaaatttagagataggctctcactctgttgcctaagctggagtgcagtgggatgatcataacttactgcagccttgaactcctgggttcaactgaaggtcctcctacctcagcctgctgagtagctaggaccacaagcacacaccaccgcaactggcttaaattaaaatataaattgtagagatagggtcttaatgtgttgcccaggctgctcttgaactccttgcttcaggtgatcctcccacctcagcctctcaaagtgctgggattatagacctgagccacagcacctggccaactgacctatgattttacacaatggctgctcttcccttctttaactattattcattcttctttgatcctcattatttgactgtagtccttcttatgtcttgttttccttcattacctcttattctatcacattgccattgtcattctccactggggaagctctttcttgctgaagactggaaagacaagtccattcacctgattttctgtaagattgtggctcatgtattgacttgtcagacaattctgaagtttcatcaaaattagctatcatgcttgcataatggccctgaaccctcactcctactcttagcttcagtaccatctatgtcctcaactgtccatgatacttataattcccgtaaatcttcacttaacacctaacatttatttaatcttactaggcaaggtaataagaaatacataggtttgcctccagaagtgggttcttaagaaacccaccagaggaactcctctttcagatgtccacattagaagatttcatatcacatttggtgccacaggcctttgacaaggaggatgcagaggaaaaagcaaacttcacctcttcctagggaaagtgttggcctgccaacaggaaagaggcaacatctgggaaaatccccagtctttgccaggaagagtccatgccaaccccaccccatgacccctgtcctgcctactcattgtcactcttcactccaatgtccctcccccagatcctcttataaaatcccactctttcctgaccagacaaaccataccatatcccaccagagaggtaagtgggagctgagagaagatgagacccagggaggagctactgcacatgacacaggagaatacatgggagggtcccttcctcagggagcacaggaactctgagactcagcaagggtgtcctgggagggctcggggatgggagagtacacagattcacaactcattcagaactgtagaagatgatggatgtgaccaagatcactttagtcctaggggactagagaaggaaaatgacatgaggcagtggggtatctgtgtgttctcccactgaccacgctttctttagtgactcctgattgcctcctcaagtcgcagacactatgctgcctcccatggccctgcccagtgtatcttggatgctgctttcctgcctcatgctgctgtctcaggttcaaggtgagattgctttgcctctagcactgggttccctatgaatcctcagagctaacaagaggaggaaggctcctgtgtgtcatgtgaggtaatgacgtggtgtctaatgaacctgcctgcagttcttgcatcatctctccttccttcaggttaacttgcagtgggaggctccatggtggtccactaacagtggaatgagatggcttccatttagtcagtggactctaatatacactggtgggaaagtggactctaatatacactggagggtcagtaatgagatgtggggagggacaatgattggaggacccaatgtagagacagcccagagtgaggagagtattgaatggttgaataaggggaaagggtaataagagactggatggtgctccatttactacggctattttgagataaagaatttctgaaaacataagggaagatgaaggggtgtcaggaatgtggtcttcctccccaaggacattcctaggtattccccaaggtcatctcccaccccaagccccactcttcattttaccctcccccctcttcttccacctcaggtgaagaaccccagagggaactgccctctgcacggatccgctgtcccaaaggctccaaggcctatggctcccactgctatgccttgtttttgtcaccaaaatcctggacagatgcagatgtgagtggttagatgtggtgttggaggtgaccggtctcagggggaggagggtctccattcaggagagttccttgggaatgaggatgaacacgtttatctttcacacagtcctcctcccacctacctttgccctgccctccctcagcaggtctcaggctccctctcattctctttgttgccctcaaagctggcctgccagaagcggccctctggaaacctggtgtctgtgctcagtggggctgagggatccttcgtgtcctccctggtgaagagcattggtaacagctactcatacgtctggattgggctccatgaccccacacaggtgccagtatatcctcccctctctgttacctctcaaggtgctattgttgcccaggcccactccctgtcccctgtgcctgcccaggaagtacttcagggagcactggagctcagattctggggaatatttggggggaaagggaaggccatgaagcatctgaagatctgagttctgtggaggtctctatctttcagataaaatcaatctgccttcctcaggcgtattacataattctcatatgaggctgggttaacaattctctgagcttcatggagtctttgcctactattctgaaggaactcttaatgaagataggatcaatttttgtccccatacagaactgacattacttttgaggttcacaagctaatcacaaatgctacatcaattattgttctgcaaataatatattaccttgagttgttccaaaggtcttatgtttattggctggaattttccaatagcaatgaggagtcaaggaagagtttcctactcaccggcagcatctggaatagcagaccaactttcctcatgctggggagcaaatcaggtgttgcagctaaggggccatgcaagaagagctgcaatggccattcccttcacctggctacctcctctactctacagggcaccgagcccaatggagaaggttgggagtggagtagcagtgatgtgatgaattactttgcatgggagagaaatccctccaccatctcaagccccggccactgtgcgagcctgtcgagaagcacaggtaagaaacagaggagctgcctcttcccagtgttttccatctcatcccccattcctgggtctgaccttcaggaaatcttcctgagctagaaaatacaatgttagtgtgtcttctcttatctcctctcttctccactttctttgaatctctctcctggattgggacactggtgaaggtgagggagaggctttaacttctaggctaaaacctgggatgccccttcattggattcacaagcttcctcagccccattccatttatgtcttctgtctctccagcatttctgaggtggaaagattataactgtaatgtgaggttaccctatgtctgcaagttcactgactagtgcaggagggaagtcagcagcctgtgtttggtgtgcaactcatcatgggcatgagaccagtgtgaggactcaccctggaagagaatattcgcttaattcccccaacctgaccacctcattcttatctttcttctgtttcttcctccccgctgtcatttcagtctcttcattttgtcatacggcctaaggctttaaagagcaataaaatttttagtctgcacttgtttgtcttgtatatgccagtgtcatagccatactctgagaaggacaaagtgtttgagtggaggaaactttatgggtcttgcttcttccctattcacccaggcctctagggaaaatgatgaagtgtgcatccctaccagtgtgttatgatgagggtgtgggtcctgctcatgtaggatttgtgttgtggagagatgaggacatttctctcccgcgtacttactgccctcccattcccgtagcccaaacctgacagtgtgacatgaacagatttaggaggctctgatggtgcttagaatagtacttctcagagaatggcatcagcaggatggtagataggactttccagctcttgaaccttcacagaaacattcatttgaactactacccattaaaatggaaataccttcacaagagctaacaatcccaagtgagtgattaaagcatctgaatgttgcaaaaaataagaaaggatgcatcgaagagggtagaaagaagacttttacattatttatatcacccctccatcaatctcagtaagcacagcatggagagacattccctaaacttggggaaagagagtgaaataagcacttgagttttccatggaccctaacactaggtttgcctcagtaagacccagtggcctctgactccaggcagacacccttggacttagactccaggctgccttgatgccaggccaggctctgtggccccaggctctgtgaccccaggctccaggtcagcccccatgactgcagcctccagtcttgccccagaagatgcaggctctagacacacacagcatcatgcttttccccatagctccagaccacaggccagcacccactgacaaagactctaagcccacctcaaggacaagctagcacttgcagccacagactccagggtgacccctgaaatcctagacatcaggcctgcccatgtggacctgcccttcagacccaccacagctccaggatagctcccacagctacaacttcaggccagcacttgcagaccccagctccagactgacactcacagtcgcaggatacggtcctgtcaaatcccaaaccctccccaagcctttaggtccatctgagcacaaagccctgatgctaggccagcctctgtggcctctgtcactaggccagcccccacagacacaagttctggattttcccagttccaggcgaggctctgtggactcggtactagtctggcctcatactccagcagacccaggatcaagcttcattacagtagaccttagcaccaggccagcccccccgactcaggctccagccttagccccatgaatccagtctccagacttaccccagaggcaagttgacattcatggtcccaggctacaggccacccccactaaccctggctccataccagcccctgtagtttcaggtaccagcccagtatgcacagactcaaactccagacctgtcctagagactcagatactacatctgtcctagtgcctggctaacccctgaagacatgggttcaaggcctgctttagagccagattggtctccaggaagtaggatttagtctggctcctgtgattagaggcttcgggcctgccctcatgaagtgactgcctaccctggtataccaagtcaataggtccacttgaggatgccagcagcaagcctgcccaaagaccaagccagatggcctgcccagaatctctggatgactgactggtgaagggctttgtctgctaaagccagtctgtaaaaactggaataagtgactacttgttcaaaaagtcaaacaccaaagacacatgaccacaagtatcataaacaatcaaggaaatatgatattaccaacagaacaaaataaaggactagtaactgaccttaaggggaaagaattttacaaactgctcaacaaataatttaaagcaattgtctaaaagaaactcagtgagctacaagagaatacagatagacaactaaatgaaatcagaaaaacaatatgtgaacaaaatcagaaggtcaagaaagagatttgttttaaagttaaaaaaaaacacatagtggctgaactgaagaaatgcatggagaatttcaacagcagacttgatcaagcagcagaaaaagtcagtgagtttgagacaagtcatttgaaattatccagtcagagaaacaaaaagaaaaaagaaacaaaaagagaaaataaagcttaaggaaactatggtacatgatcaactgagccaatatatatattatgggttttctagaaggagcagaggcagaaaatgggcagaaaacatatataaaaaataatgggtcatggggtttggcatccccatgcctgtcagtgcctcaccccagccaacgagcatgcacccagccatgctgccactgccgtggcatgagcacagatcccactgctatcaccctgacagagtactgtggtcactgccacttactggagtgttgtggccagcaatccaggaacacctttggacccccagcacagcaggttcctaacttcgaggggtgagagaacaaagctaggggcctgataatagcattccagaattggggaatgctgagctgaaccttggcccactgacatcttccagaaatgaagtgagtcaactgagcccaccttataccacaatcaaacccccaagggcatcaaaaaggataaacacacacacacacacacacacacacacacacacacaatccatccaaaaaacagcaacttcaaagattaaaggaacgccagcccacacagatgagaaagaaccagtgcaagaactctggcaactccaaaagccagcgtctatttttacctccaaacaattacactagttatccagcaatggttcctaaccagtctgaaatatctgaaatgacagaaatagatcttggaatatggataggaaccaagattattgagcttcaggcaaaagtgaaaatccatttccaggattctatacaataaaacgatacagaaaatgaaagatgaaatggtcattttaagaaagaaccaaactgatctgatagaggtgaaaaactcatttcaaaaatttcagaatacaatcacaagtattaacagcagaattgatcaagctgaggaaagaatctcagatctcaaagacagttctctgaaataacttagacacatattagaaattaaaaaaagattgaagaaaattaaacaaaacctctgaaaattatggtattatgtaaagagaccaaatttatgactcattgaaagcaagcaatttggaaaacatatttcaaaatatcatccatgaaaacttccccaacctccttggagagggcaaactttaaattcaggaaatgcagagaacccctgtgagactacacaagataaccatccccaagccacacagtcatcagactctccaaggctgaaatgaaagaaaaaaatgttaaaggtagctagagagaaggggtagatcacttacaaagggaacctcatcaggctaacagcagtgttgtcagcagaaatcctacaagccagaagagattggggccctatattcagcattcttaaggcaaagaaatcctaaacaagaatttcatatccaggaaaactaagcttcataagctaaggagaaataagatccttttcagataatcaaatgctaaaggaatttattacctccagacctgccttacaaaataacctaaaaagagtgctaaatacagaaaggagtgaccattactggctactacaaaaacatacttaagtacatagaccagtgacactataaagcaaccacacaaacaagtcttcataataactagctaacaacatgatgacaggatcaaatctgcatacatcaatactaaccttgaatgtaaatgggctaaatgccccaattaaaaggtacagagtggcaagttggaaaacaagcatgacataatggtatgcccctctcatatgcaatgacccatctcacatgcaatgacactactagactcaaagtaaagggatggagaaaaatctaccatgcaaacaaaaaacagaaaaaaaaagccaggtttgctataccaatttcagacaaaacagactgtaaaccaagagatttttgaaagacaagggcattatgcagtggtaaagggctccattcaaatgaagacctaactatcctaaatatatacatacccaatacaggagcacccagatttataaagcaagttcttagagacctacaaagagaattagataaccacacaatcagagtagagacttcaatactccactggcagtattagacagatcatcgaagcagaaaactaacgatgatattcaggacctgaactcaacacttgaccatatctagtagacatctacagaactcctcactctcaaacaatagaatacacatttttctcattggcacatagcacattctctaaaattgaccacacaattgagcataaaacaatcctcagcaagctcaaaaaaacaacaacataaaaacaaaaacagaaatcataccaaccacactctttgatcgaccacagtgcaataacaatagaaatccctactaaaaaatcacctgaaaccatacaattacatggaaattaaacagcctgctcctgaatgactttgaggtaaataatgaaattaaggtaggcataaagaaattctttgaaatgaatgagaacaaagatgcaacatatcagaacctcccacacacagctaaagcagtgttaagagggaagtttatagcactaaacacccacatcaagaagttagacagatctcaagttaacaatctaacatcacacttagaggaattagacaagtgagaacaaaccaactccaaagctagcagatacaagaaataaccaaaatccgacctgagctgaaggaaactgagatgtgaaaatcatacagaagatcaacaaatccatgaatatgtcatttaaaagaataaatatgactgatacaacactggctagactgacacagaaaaaagataagatccaaataaacacaatcagaaatgacaaaggggacattaccactgacaccacaggaaaaacaagcaaacaagcaaacaaacaaacaaaaaccctcgacgactactttgaacaccactgtgcatacaagttgaaagacctagaagaaacggtttaattcttggaagcatataacctcccaagattgaaccaggaagaaattgaatccctgaacagaccaataatgagttctgaaattaaatcattaataaaatacctaccaaccagagaaagcccagggcaggatagattttctgccaaattctgtgagatgtataaagaagagcagaagacaccattcttactaaaactattccaaaaaattgaggaggggagactccttcctaactcattctatgaggccaacattgtcctgatatgaaaatctgacaaagacacaacaacaacaaaaaatccaacttcaggccaatatccttgatgaacattgatgcaaaaatccttaacaaaatactagccaactaaatccagcaacacaccaaaaagccacaatcaactaggctttagaatgtgaggttggttcaacatatctaaatcaataaattgatttatcacataaacagaaccaaaaacaaaaaacacatcatcatatctatatatgcaggaaaggctttagacaaaattaaacatctctttgtgtttaaaccctaaacaaagtaggcattgaaggaatatcctttagaaccttaagcgccatctatgacaaacccatagaaaacatcgtactgaatggacaaaaactggatgcattccccttgaaaactgaaataagacaagaaagtcctctctccccatttctattctacatattactgaaagtcctggccaaaacaatcaggcaatagaaggaaataaatggcatccagatagggtgagagaaagtcaaactatccctgtttgcatatgatactattctatatctagaaaaccccattatctcagcccaaaagctccttcagctgatgaacaacttcagcaaagtttcaggatacaaaatcaatgaaagaaaatcactaggattcctatataacaacaatatcccagcagagagacaaatcaagaacacaatcccattcacaatagttataagaagaataaaatgcctaagaatacagataagcagggcgacaaaagaactctacaaggagaattatcaaacactgctcaaaaaaatcagagatgacacaaacaaatgaaaaaacattccaggctcattgataggaaaaatcaatattgttaaaatggccatactgcccaaggcaatttatagatttaatgttattcataagaaactaccggaaactttcttcacagaattagaaaaactattttaaactttatatggaacaaaaaagcccgaatagtcaaggcattcctaagcaaaaaggacaaagctgaaggcatcacattgcccaacttcaaattatactagaaggctacagtaacccaaactgcatggtactagtacaaaaagagacagatagaccaaaggaacagaatagaaatcccagaaataatgctacatacctacaaacatctgatcttcaacaaagttgacaaaaataagcagtgggaaaaggacttcctattcaataaatggtgctgggataactggatagtcatatgtagatgattgaaactggaccccttctttatactattttaaaaggtaaactcaagatggattaaagagtcaaatgtaaaactataaaatcctggaagataacctaggaaatgcccttctggacataggatcttgcaaagatttcatgatgaagatgccaaaagcaattgcaacaaaaacaaaaattgacaaatgggatctaattaaagaaaagagcttctaaacaacaaaagaaattatcaaaagagtaaacagacaacctacagaatgggagaaaacatttgcaaactatgcatctgacatagtttggtctaatatccagaatctacaaaaatcttaaattagcaagcaaaaactgaacaactgcattaaaacgtgtgcaaaggacatgaacagacacttttcgaaagaagatatacacacagccaagaagcatataaatatgctcaaaatcactaatcatcagataaatgaaaattaataccacagtgagatgccatctcacaccagtcagcatggctgtttttaaaaagtcaaaaaataacagatgctagcaaggttgcagagaataggctatgtttatacacttctggtaggaatgtaaattagttcagccactgtggaaagcagtttggaaatttatcagataagttaaaacagaactactatttgacccagcaatgctattatggggcatataccaaaaggaatataaatcattctaacataaagatatatgcatatatatgttcattacactgttattcacatagcaaagacatggaatcaacctaaatgcccatcaacagtaggctaaataaagcgaatgtggtacatatacacagtggaatactacatagccataaaaaacaataaaatcatgtttgcagcaacatggatggagctggaggccatgatcctccaccaactaacacaggaacagaaaaccaaatactgtatgttatcacttataagtgagagctaaagtttgactacagatggccaccaagaagaagaaaacacacactggaacctacttgaggatgaggggtgaaatgagagcaaggactggaaaagcacctattggatattaagcttattacctggatgaaaaaataatctatacaccaaaccactgtgacatacaatttacctatataacagactggcacatgtactcttgaacctgaaataaaagattttaaaaaaagaaagaaaaaaatggttgtgaaaaacttcccataactggtgagaaaaaggaacatctacatccatgaagtacaaaaaactccacatacattaaatataaagacatcttcactgagacacattacaatcaaattccaaaaagtcagggatgaaaagaaaattttcaatgcagcgaaagaaaaataacatattatgtgcaagcgaatgtctataagattatcagttgatttttcagaaggtacctttcagggcaggagagagtgggataatatattcaacatactcaatgaaaaaacaaaacaaaacaaaaccctgcaaaccaagaacactatacctggcaatcctatccttcagaaacgatgaaaagagaggaagtttaccagaaaaacaaaagctgagagagttcattaacactagaccttctttatgtaaaagactaaaagaatttcttcaagatggaagataaaaatgctagctgataccataaaaacacaggaaagtataaagtataaattgactatgttaagtacatagtaaaatttgaaatactctaacattgtagtgatggttggtaaatcacttaaatctttagcataaaagacaaaactattaaaaacaacagtaactacaataattgttaaggaatatgcaataaagaaacatgtaaattgtgacaccaataacaagaatgtgcaaacaacagcaaaagtgtaaaatatttttatgtgatcaagttatctttttaaaatagtctattataaatatatttttgtaagctttatggtaaccacaaagcaaagacctataatagataaataataagaagcaagcaaccaaagtataccacaagagaaaattatctagtcaaaaagaagagagaaagagaggaagaaagaaacaaaggacctacaaaacaaccagggaacaatgaacaaaatggcagtagtaagtaattacttattaatgattattcaaaaagtaaatgagtaaaattctccagtcaaatggtatagagtgatcaaatgaatttaaaaaaataccaacacacaacttaatgttcctacaagaaacttactttagctttaagaacacacataggctgcatgtgaaagaattaagatatttcatgcaaatgataccaaaataaaacagtggtagctatagttatattacataaaatagactttaagttaaaaactttaaagagaggcaaaggtcattatataataataaagaagtcaattcagcaagaggatataataattttaaatatgtgtgtacacatcattggagcccataaatatataaagcaaatatcaatagatctgaagagagagaaaaattgtaatacaatatttgttggataattcagtacccactttcaacaatgggcaggtcattcagacagaaaaaaattcaataaacagcggacttgaactacacttcagacaaatggacctgacagacatacagaacatttcttccaacaagagcataataaacattcttctcaagtgcacatgggacatgcttctggagagatcatatatttggccataaacataggctcaacaaattttaaacgactgaaatcatatcaagtataattttcacccaaaatagtacaatactagaaatcaataaaaagagaaagattggaaaatattcaaatatgtagaaattaaatgacattatcctaagcaaccagtggaccagagaagaaattaaaagtgagattagtggtgggatccagcagtcccactactgggtatccagccacatacaaaaatgattatatatcaaaaaaacaccagcatgcatgtgtttattgtagcataattcacaattgcaaagatatgtgcccatcaaccaaagatggataaagaaaatgtagcatacatatatatacatatacatatacagacacacacagacatataccatatatatatacacacacacacatatataccatggaataatggtaattgactagccataaaaaagaacaaaataatgtattttgcagaaacttggttggaactggaggctgtcactctaggtgaagtaactcaggaatgaaaaaccaaatattgcatgt

SEQ ID NO: 230 - DNA, 809 bp, Homo sapiens
acaaaccataccatatcccaccagagagtgactcctgattgcctcctcaagtcgcagacactatgctgcctcccatggccctgcccagtgtatcttggatgctgctttcctgcctcatgctgctgtctcaggttcaaggtgaagaaccccagagggaactgccctctgcacggatccgctgtcccaaaggctccaaggcctatggctcccactgctatgccttgtttttgtcaccaaaatcctggacagatgcagatctggcctgccagaagcggccctctggaaacctggtgtctgtgctcagtggggctgagggatccttcgtgtcctccctggtgaagagcattggtaacagctactcatacgtctggattgggctccatgaccccacacagggcaccgagcccaatggagaaggttgggagtggagtagcagtgatgtgatgaattactttgcatgggagagaaatccctccaccatctcaagccccggccactgtgcgagcctgtcgagaagcacagcatttctgaggtggaaagattataactgtaatgtgaggttaccctatgtctgcaagttcactgactagtgcaggagggaagtcagcagcctgtgtttggtgtgcaactcatcatgggcatgagaccagtgtgaggactcaccctggaagagaatattcgcttaattcccccaacctgaccacctcattcttatctttcttctgtttcttcctccccgctgtcatttcagtctcttcattttgtcatacggcctaaggctttaaagagcaataaaatttttagtctgc

SEQ ID NO: 231 - protein, 175 aa, Homo sapiens
MLPPMALPSVSWMLLSCLMLLSQVQGEEPQRELPSARIRCPKGSKAYGSHCYALFLSPKSWTDADLACQKRPSGNLVSVLSGAEGSFVSSLVKSIGNSYSYVWIGLHDPTQGTEPNGEGWEWSSSDVMNYFAWERNPSTISSPGHCASLSRSTAFLRWKDYNCNVRLPYVCKFTD

SEQ ID NO: 232 - DNA, 34571 bp, Mus musculus
  misc_feature (1)...(34571): n = A,T,C or G
atacattataaactagtaaactaagcctcacaggttgtacacacatatctgtattgttagtgttgctgttattattattgagacagggtctctttatgtaacccttgttatcctggatctttctatgtagaccacactggcccggaactcacagagatctgcctgtctctgcctcctgagtacatctgtattttaagtgttgtttttccacagtttgagacatattcagtctcctttgactctgtttcccccacgagcctcctgtatcttctcccttccctccaaaccccttcttcccagtgaatcccttttctgctttcatgtgtgtctgtgtgtgactgcacatgcacacatgtgtgagtgtgtttagttggggtttctggcatgagtgtgggtgaggagttatttacctaaacaaaggcaacttagagtgtctaagtcagcactgaggactctaactcctccttctccggcagccatcgcctgcctatggcacctccgagagggacaggcctcatgaggtgacactatccatgccatacatgacatatattcacacatgagaggatttgatggacccagccttgtacagatctacagtgagttcatgagtaccataaccatgccatgtatggaagatataaaactcatagaaacgccttcccatagaacgccatcttacactctagccatccttccttctgagatgttccctgagtctcagaggtggtgatgctgcggtctcatgtagggacacttcgaccagcacatagtcaccacattcaccatcacctactacaaacaagagctagaatttttttaatttctaattttgagccccaacgtatcttatatatgtgaatccataaaaggaatttgcctgagtggccatcattttttgaaaggtgcagtttacgtgagcatgagcctttaatcctatcacttagggagcagaggcaggtagatcctgtgagtctgaggccggcttatctgcaagtgagttctaggtcggttagggttacatagtaaaaccctgacttaaaacaggcagggaggcaggcaggcaagcagacagacagacagcaaaagagtgaagtaggggagtaagaaggaagaaaatatgagtattatatatactaagtattctttataatgtttattatatgttgtgctggatagtttcatgttgatgacacaatctagactcatttgagaagagggaacctcaattgaggaaatatttccataagactgagctatagagacacttgtagggcattttcttatttaatgatgggcgggggtgagatggggggcacctctggcctagtggttcaggttctcaggctaaagaaaccatgaggattaagccagtaagcagcatcccttcgtggctcctgcatcagctcctgccttcaggttcctgcctggtttgagttcctgcgttggctcctctcagtagactaggactcaggatctgtgagcttaacagagcctttcctcctcacactgcttttgctgatggcactttaccacagcaatggtgaccctaactaagacagaagtgtatgcacaccaagcaggctgcattgaatgcatgtctcactgtggggcacagtcacagtgacaggatacatgatgtatctaacagggactaaacactcaattagagcagaggctgaagctgatcccagtggcagacacttggagtctcagcatgtaaaaaacagaagcaggagggatgccatgagtttgaggccagcccaggtaacaggcaacagcgtgagagatcttgtcaaacacacaaaccagaattacaaaacaaactcagagatatggcttaacagataaaggtactcactgccaagcccgaggacccaagtaagaactgactcctgcaaattgtcctctgtcctccacacacatatgtagaatgctcatgctcatatacacacacatacaaatacatacttgcatgcttacatacatacacacatatatgcatgcatacataatacatactacacacatatacatgcatgcatgcatacatactacatgcatacatgcatacacatgcacacacatatatgcatacatatggcaacaacaatatagagtggaaattaaaatagaccagcaaggtatccgaggcagaggcagcaaagtctgtgtggcatgatggaagtttcagctgttccagagttggccctggggacactcgttctgcgcaaagaaactggtgggttttgctagttgtgggaggtgctgtccttgttccagaaaggtctccattatataatgtgctctttgtgtggacaggccgagagctctgtgggatgggctgggaggtccagtgtggcatgctagctgtgtcagaacagggcactgactggtgtatctaagtaaagaggtccttgtggtgtagggcactggctttctgagtgttcttaggacatatgctagacccgtgactctaaggccagagtcaaccactcggctggggcccagacatcgtgcttgccaagtccttcaggccactgtgtcaagttcgagaaccgctggctgtctgaggcataactgtttggtgtttagagcatcttagaacactgggcaaagcctgctccttgatgaacagcagaagtgctgggtcctccatctggcctttaggtgctgtatctacaatctttctctcagtctctcagccttatacagcacattcacacacagctctcctgtgagagatggctgcttggcccttcatctcaagctccttccaccctgtaccacttagctgtgttacattaacctggtaccactgaaaatattctcaacacatggatagatacatatacaagtgcatccacaggctgtcctgccctccctgttagacacactgccccacgttgtctcttccctggccagtgctcacttagtactcatccgataaacacctgatccaggcatctgacttgctctccaggctgaggtgcccagatacacacatagtccctgtaaccttacggtaaccttggtgtgccaacccaacacctggcctgtttcctccctgcagactacttactacctggtacctaaagacagcagagctgtgtgtgtgggagttggctcccagcaatgacagcctttattgcccacttcctgtgttgactgtaatgtgcttttgggtcctgtgcctgagtgagctgctaaccttcatactgcttccactgctgtctgaagctcagtttccacgtctgtaatgtggtgataacatgattacacctaaaggctgttcagaggaggaaaggaagggagagtgtaaagaatttagcttgatgtatggaacacaacactaagaaacagcctctggaggggttagccatagttttcccctgagacagtcaggaaagtacaaatcctttgcaaatcgtgtggccttgtgcggagttaggtttgatgcctatggagctgcctccagatgctggctctctaaacctttctcactataatcatgagaagaagaaaagaaggaggaggagaaagaagaagaagaggaggagggacagaaggcactgtttctctaccttccagtccccaactatggcaggcaccatgccactaacttctaacacagatgttttgacagttttgtatgaagagtgaatgttaagggttgggcgggcagcctgatatactggcctagcttatgggcaggacttggtttgaacccctggtcctagagggggaaaagagtgtgttgggcatggtggcgcatatctatcaccccagcattccagagccagaggcaagtgggtctctgtgggttcaaggccagtctcctttacacagtgagggcctatctggaaaagaaaaagaaaaagaaataagacggacagacagatacagtggagtataaagactgagaaaagctaaagttgagagacatagggctgtgtaactgttgaatgctgtaaaaatccaaggttgattttccttaaggacttagaggggccctactcttcctgaggctaatgagctgtgaagtgttactgctcaccactgaaagagacccagaggaagaacaacgaggtctctgcccaggaacagagaagagcactcccagttaataaaaggctgaggcagaggggacccattccctccagcaacgctctaagcctctgtggcacaagttaatttctctgtgggtacaagtgattataactagcagctggaacaaatgaaaatgaaatacaatctattaacagcgaggcataattactgagaaaattccacctgagctggggcttaagcagccacccacacctaagccagacacaaatctggcaaagccaccactggtcacttcagtgagaagcctggggtagaataattcagacttgagaaagctgtccacagggtagaaattgagaatcagaaacaaactgcaaattgaaatgtaatcttggctgtcttacctggaagcacccctaccccagctgactataacagaaaattgaaacctctgccttcatctcttttaagtcaaggaccacagcataggcattgccttctccatcctggagaagctactctggttctatgggcttgaaggtttcagttaccatagcaactctctgcaaccattagcctacaagagctaattttggctcacagttttggaggtatcagtccatcaccggttaacaccattgcttggggcctatggtagcagtatgtggcagaaccacgtggcagaggaggccatctgtgtgacgtacggatgatgctctgaggggatccctggaacccaaacgtccctctgctctacctctgcttctgtttggagcttgggtctacgaggcagtgtcttgccccaaacattcaggtcatccaggatggccctaaactcacagacatccttttgcctcagcattctattatctgtgttaagatagaggggctggagagatggtttagtggttaagagcactgactgctcttccagaggtcctgagttcaattcccagcaaccacacggtggctcacaaccatctgtagtgggatctgatgccctcttctggtgtgtctgaagacagcaacagtgtactcacatatataaattaaaaaattattaaaaaaatattgcagataacaccgggtgtggtggcgtacacctttaatcccagcactctggaggcagaggcaggcagatttctgagttcgaggccagcctggtctacaaagtgagttccaggacagccagggctatacagagaaacccaatcttgaaaaatcaaatatatatatatacatatatatatatgtatatatatgtgtgtatatatatatataacagatagatgttcctccacactgctttaagccccatctctttatttattgacctatatatcttatttatttttattattgtattagtttgtttctctggtgctgtgataagatgggaggaaagggtttatttgacttacacatcataacccgtcatccagagaagccagaaccttgaggaaggaactgaaataaagaccaggaaagagcgctgtttgctgacttgcttccaggctcaggtctagctgccttttatacacctcccaggaccatgtggccatcgctggctcagcacacagtgggctgggctctcccacatcatcagcaatcaagaaaatgtcccttggaccaggcagtggtaacagacacctttaatcccagcactcaggaggcagaagaaggtgaatctctgagtttgaggccagcctggtctctcatctatagagggagatccaggatagccagggctataaagagaaactcagtnnnnnnnnnnnnnnnnnnnnnnnnnnnnnnnnnnnnnnnnnnnnnnnnnnnnnnnnnnnnnnnnnnnnaaagaaagaaagaaagaaagaaagaaagaaagggagagagaaagaaagaaagaaagaaagaaagggagaaagaaagaaagagaaagaaagaagaaagaaagggagaaagaaagaaagagagagagagaaagaaagaaagaaagaaagaaagaaagaaaggaagggagaaagggagaaagaaagaaagagagagagagaaagaaagggagaaagaaagaaagaaagaaagagagagagagaaagaaagaaagaaagaaagaaagaaagaaagggagaaagaaagaaagaagaaagaaagggagaaagaaagagagagagagagaaagaaagaaagaaagggagaaagaaagaaagaaagaaagaaagaaagaaagaaagaaagggagaaagggagagagagagagagaaagagagaaagagagaaagaaagaaagaaagaaagaaagaaagaaagaaagaaagaaaggaaggaaggaaggaaggaagtaaggaaggaaggaaggaaggaaggaaaagaaaatgcccccttgggattggaaagttggctcagcgattaaaagcacttgttcttgcaaatgacccaaatttgcttcccaacacccacatgaaggctcaccacctccttaggaatcaggcacatgtgtggtgcacagactaacatttaggcaaagtactcatacacataaaataataaaaataaatctgagagagagagaacaaaggaaaggaaaggaaaggaaaggaaaggaaaggaaaggagaaaagaaaagaaaagaaaagaaaagaaaagaaaagaaaagaaaagaaaagaaaaaaaattgttccacagacttgcttacaggtccatctaatggagacagttcaactaaggttccttcttccaagttctgtcaagttgacaaccaagattagtcatcacaattacattcagtgtaagtgtgtgtgtgtgtgtgtgtgtgtgcatgcacacgcgcgagcaacacttatgtggacgtcagaggacaacttatgggatttggctgtctccaaccatttgtttcctgaggcaggaaaggggaggggaggggnnnnnnnnnnnnnnnnnnnngaggggaggggaggggtgggtcctcactcttcctgacattccctctgagtctacaatgcagcctgagaatcactgaaggtacaatgattgagaatcctcaaggagacagccccagatcaattccaggctccacccacctcctcacattgccatcagcatcaccacacccaatgctgtgtccacagtgcaccacacacggcacaattctttctacacactttctcatgcagtcctccatctctctctgtctctctgtttctctctctgtgtgtctctgtgtgtctctgtgtatctctgtttctctgtctctctgtctctgtctctctctctctctgtctctctctctctgtctctctctgtctctctctctctctctctctctctctctctctctctctctcacacacacacacacacacacacacatctccctaatgtccagcttaggtcctacttccacacagtcttccccaacctttgaagtgtctagctatatgaagtaagatgctggttttgattttatccttccaagagtggacttggttagacctagggatggctttttcatgttgtcatcacatccacagatgacaagtttcccttcataaaatccaatggtgggttaggaccaacaacgtgaagtccattaagcacgctgccaagggtagaaggcactacagaaaaggtcacgctaattgcaactaaatatgttcagagtcccgaacaaggaaactcgccttcccgtggtttgtccttgtcacaggctttctggaccactgacaggaaatcacctaaggtcaaagcacaggctgataaggcacccagaaaccagctattcgaaaaatagttgaagacattaggatgtgggttgggacacataagactcacaggcacatgatatctgtacccagaggtcacttgggagacatgctacctacacacacggtcctgtctgaggcccagctgggggtgtcatagaagatacattttgactcagcatgaaggctcaagtttctaattctaaacagtaaaccatcctactctgaaacatgatctaccctcccccttcgcactttattttatggatgggtcttatcacatagacatctttagcctcaaactcagaatcttcctgcatcatcctcccaagtgctggggtgacagacattcaccctcacagctgaggaaccatgatttcatgaggcagctttctcccccttgagtgaggatgctttggtctcctttcttgcatcctctggagaggaggggtgggcagagtgaggcgtgaccggcttgtctttcaaagtccctttccattccttggaatttctcatgctttggtcttttctggacagtgtgctcagagcagcaaaagctgacttgtgtgtgttgctgggcaggaggggcgtgaccgcatggtgtagggttggaaggatgaacagtgcttcgtcagctccagactcaggaagcgccgaggcagtgtatccctgagcagtacaggaccagaagagctggagaggggctccaaccctgtgccctggctttcttcctccttaagaacagttttgggggccagcaagatggctcaacaaggaaagacatttgccaccaaacatgactacctgagtcccacattcccacattgtaggagagaaacaacttccacaagttgtcctctgacctccataggctctctctgtgtgtctatatcgttgtctgtctctgtctgtctctgtctgtctctgtctctgtctctgtctctgtctctctctctctcacacacacacacacaaatagtgccccgtatgtagtacctacatagtgtagtgggtacaatcttacactatcatggactaagtcaggaaatatcctcccacggaagaaaacccaccaggacaagacctggaggggaaatggatcaatgtccaccacaggtcttcatgaacgaagtggctctcaggatgggacagagcaggggtggagagcaggggcagagagagcctgcagagcagctatgatggaagcaggggatgacaaatgtggagtcaggacacttgggtgcaaggttaccaccattgatgcgttacaggatcctgggtaggtcagtctccatctctgggcttcggggtcctcctgtgtaaaattggagctgtgggggtggcctaggtaaccatccatgtcctttcaagctaggtgtctacaagtttacttgtggtggaacgcctttttgacctttttctctgagtcagagacagctcgatggccatatttatactgcactcttgtctggtaatttcattttacattttttcttctagtattcttagggttcttccctttgaaagaacttaactctttcaaacttgagctgaaaagagggaggggcagggttccccctccctggccgggcaaaaggatggcagtcacaggttgatcaagtgccctggctcgcctgggactgaggggtttcccaggacaggggactttctttggttctgggcaaactgggatggttggtcaccctagtgataaggaaagtgagtgtgtagaggaggctgggagtactcttttcttagccccttctatgaggagttccccaagtctatatgcatccctcatagagatccagtgagcagaagggaggggcagccttcacaccagacgcctggcccagttcagaccatgagtgccaggaaaggcactgaaatgcttgcgtagtactgactctgtggggggagtttccctttttcttaaaaaaaaagaaaagaaaagaaaagaagggggaaaacacacacacacacacacacacaccagaaaagactcagtggaaaaaaaaaaaaaaagagatgagtcgagaggcaagcagcaagccctcactggccccaggagaccgcacatggctcatttgtttaagtttgcagctgacgcctgccacctctccataggcaccagcacaaaccttctcgacatcagacagtgaccagcctggtgacgcagagctgcagctatgaactacccactaaccctggacatgggctccatcacatacaatatggatgacctggtgagtcgagtcatgtggctccctgctgctctggtcctgcttggaactttaaatatactatgtcaaggaagaggggatagcttgggaatcccgccgcaaggattatagaacataggcaaatacatccacttttagactcttattgtctcccatatctgttgcccttaatagatgccaaagggaggtgggagacacaggatcaggtttggcatctcctgctgtgtgactgaggacccagctctgcctcttgcttctttaacagagaagtttatcttgtctccctgagttaaaatggcaaagtcatttggaaggggtatttttgtttgctgcttttttttttttttttttttttttgagactgagcttctctgtgaagcaagcattggctgtcctggaactctgtagaccaggttcaaactcacctactacctgccaagtactgagattaaacgtgtgcgctgccactgctgctgccgccgctgccaccaccaccacctggctggaagttttcttcatgtcagtttgctggcagtgctagtcaatcaggcagtgtggagttgttggctgggagaggaggggtgggcagagtactcagttggtagagtgcttgccgagtgtgcatgctgctaggctcatcctcagcttgcacagagtgtggtggtacacacctataatcccggcatgagaaaggtggaagcaaaagactcaggggcgggagcctagaacacattgagaccttgtctccaaaagaaggtatatataattgttcatcttgctgaatgacttgatcattaaggcacaatacaacatccatctgtgttgggtggagagactgagaacataatctttgccctcaagtcgctgatggtccagacaaggtggagctaatccctggctggaaggctttagacagtgattttgtatagatgaagaaagcatgaggccagacgtggcaaggaagaggaccccaggggtcaaagtcatgcagctgtattgctcctaaaaacaccttggagcatgtcgctttgccctgggagggactgtcatctctagagatacagtatcttggaagagcttcttaggtgggagcttaagaaagaaacaagcaaagaaaggaagcagtgcctggcaccctctccgccccctgcctgagtgtcttccagttaagcataggagttcacttgacttggctgctattggactaccaaaggatgttgttaggagcacttcaagtggaaaaacccagggctgtggggcagtgggttatgggcatcagtagacttagaaccttcatcatgaccttattctctatgaactccaaacccagagccctatcagctctcctgccctaatcacaccttgaggtgtttccccccgactctcccagctcgccaggatctgtggtctgctttatcattcttcccactatgtcgctgggcttgctgaacctgctcagctggcatcacttgggcactcatggggattctgcaaataaaaggacctcaggcttggctcaatgctttctgttgttgtcttgaaaaaatttggggggtggggttgtttgttggcttgtttgtttgaaacagagtctctgtgtagcctaaatctgcttcaaactcatagtcctcttgcctgagtcctttgaaaacctaactgttctacaggggagtgtgctcccacgcttgcttgccctcatccccactgccagctgcccctgatatggttaggtggtatcttctgccctcaagctgaccatcagccctgacccacttggatgcctttgtaaccacctggagacctggccgttcctggcttctgagaaacctcaagagtttcccctaactgcacgcctcacatcacagtgtgacctactagagacaggtggtagtgggggccagagggacagcaggacgtgctcatgacatgaagcaaacctacattccaaggagagaagcaaggtaacttctttcatgacacatatcaaacccaaggccctgagctatgtgcccagacatctcgctaggagtccaggggttctaagacaaccctgtccctggagtccttcaatcagacacgttcttccttcacccaccacccactctcttcaagggtggttgtcactctgaaacacagatcctcctctttggccccactcaccttctaaaaggccatgaccggccttggcatactgccctattctgtcatagcatgcatgtcctggaaagacagaactggcagaaaagtttagcattagtggcttctccataaaacaatgggtttctgttttgctctgtctgtctgtcatactggacaagacagtatgacaaggcctcctgcatccccagctctcccaaggagcacttcctgccctgtgacagacacttggaaggactgcaggcttggctcaatgctttctgttgctgttttaaaaaaatttgggtgggcgggcgtgtttgttggcttgtttatctgaaacaagagtctctatgtagctaaatctgcttcaaactcatagtcgtcttgcctgagtcttttgggtactggcattataaatctctgaggtcttagcttgacatttttcttaggcgtctgctgagcttctcccattgactttattttctgctcctcactccctgtctttgacccagctgattactggcccacttctccagatcagaaggttcaacactcccaactctgagttctgaaacaacagtcttgataagtcaaccatcccttgtcttaattttaattttctttttacatttgtttatttatagtcaacagaggataacttgtaggattcagttctttctttccagcatgcgtgttctagggacttaactcagctttttaggcttgatggcaggtgccccattaagtgtctcaccaactactctttttattatttttaatgacaactgattttgagacaggatttttttcccctttgcctttttgagacagggtttctctgtgtagccttgccaatcttggaacttactctgtagaccatgtcgatcaggctggcctaaaacttagagatccaggttggagagatgactcagtggttaagagaactgacagctcttcctaaggtcctgagttcgaatccagttaaccacatggtggctcacaaccatctgtaatgagatctgacaccctcttctggtgtgtctgaagacagctacagtatacttagatataataatgatacataaatctttaaaaaaacaagaaacaaaaaacttagagattcgcctgcctctacctccttattgctggggttaaaggtacgcaccaccactgccatctgagacaggatttttctaagtagttcttcctgtccagaaacttgctatgtagattaagctggccctgaactcagagatctgtctgcctctgattttcaagtgctgagattaaaggtacgctccactacaccctgtccatgtagaccaggctggcctcgaagtcagaaatcctcctgcctctgcctcccaagtgctgggattaaaggtgtgtgccaccactgcccggctaacagcgaatttttaattgttgttgttgttgttattattattattatttattattattattattttgtgtgtgtgtgcgtgtgtgtgtgtgtgtgtgtgcgtgtgtgtgtgtgtgtgtgtgtgtgtgtgtgtgccatgtgagtggaggtcagagagcaacgtttgagaattccttctctccttcttccatgggttccagggagcaagctcatcatttgtcagttgtcaggcatgtatagagagcaccttttcccatcgaggctcttttgtcccttgaactcaaagatcacctttgatctcccacacacttgctggccatgggcagctactaaacttcttgatggctaagagccaggagaagaaccctagcacctagagtaggcatggccagaggtcaccccactctggcgaggtgggccctggtggccctggaggagatcctgtccaggagaaccaccatgagttctttcctgtcactcctcaaatcagaggtccgtggtggggcttgtctggaacccacacagactagttctgaaataaagttctaggcgtcaggaggggaggctgccatagaacagggtgaagctggtctaagtctcgcttccctgacctttcctcatagacgatcaccaggagccatgaactcattgtgaccagagcatcacaggtcacagtctgtccacacacaagtgtctcagttcagcaagggagttaaaaagaggaaccaaaactcgctcaagctgtttctgggctttacctgagtggaggggagggtccccccgttctaaccacgtgaaaagtcccacagaagccccgttagaggaagcctcaaccgagggtaactggagggatcagaaatgaggggaaacctgaaaccagccttcgaggggttgcattagggagaatataggttctattactcagatatcacagaccgcattaggaacatatctctttataagagacacggtctgcctgttcttattcctttgggggacacataaaaagcaacaggtatttgggatgcgaagtcagaatacaggaatgagtttcttttgggaatgaaagacaaagtatttcaaatctacaccatcccagaaggtccagcaagatggttcagagggtaaaggtgcttgctgccaaccctgacgacctgagttcagtcctgcgtctcatatggtaaatagagagaaccaactctgaagttgtccactgatcttttgaaatttccacacagagataaatataataattttttaaaatttaaagcaagtgttatctcaggaggcagctttaagaggttactgggagattcgtgtgcacgttcctcaaatacatgaccccatgttcacagtgtagacagccattggttctcaagatgaactcattttaaacctaaagacgtggcaaagcgatagttcttccacgtttcccccagagccaagcatgacgccaatgactaagcatttaagagattgaaacagggagggtcataatgttcagggtatcctgagttcaaggctagcctgggctacacagtgatatcctgtttttaaaaactacacactggggctagagagatggctcagtgactaagaacacttgctgttcttccaagtttagtttccaatacccacatctagtctgatgagctcttctagcccccaagaacacacacacataagtggcagacacacacaatatatatatacacacacacagaaacataagtaaaataaaaagaaatctctttaaaaaatctaaaaatcaaaagcactacatactcctaatggccaaaaccctcaggcagagatggaagaggacccagtaggtttgctcctttgggggaaaagaaggacatggggcacatgacaaaccagagtcctgaattgtctttggggaattctgaaagaagagtgtgttgagaagaacagatctacacacacacaacccagtctcattcctatagactgcaccctgcaagttactgaaggctgaacttaatagcctctcccagatcccaactggtggctggaaacacttacgtaaaaggagacataagctcagcagaacctggaaacacaagcctgtaatcccagctactcaggagactaaggcaggagggttcaaaattgaagacattgcctacagagtgagttcaaagccatcctgggcaacttagtgacatgacactgtcttaaaacaatgagtaagggccaggtggtgcctgtgcacatctttaattccagcactggagaggcagaggcaggcagatctctgagttcgagaccagcctagtctatagagtgagttccaggacagccagggctacacagagaaattctgtcttgaaaacacaaataaggcctggagagatgactcagcagttaaaagcattggctgcacttccagtgatcctgagttcaattcccagctaccacatggtggcccgcaatcatctgtaatgggatctgatgccctcttctggtgtgtctgaagacagctacagtgtacttatatacataaaataaatattttttttaaaaaaatctacatctgttttaaaaacacacaaaacaaaacaaaagtaagtaaatagttatgctcttttgctatgaaagtatgaggattcaagttcacatacaagaggatccctggagggctggaggaagggctcagcagttaagagcaccggatactcttccagaggtcctgagttcaattcctagcacctacatggtacaaccttatataactccagttccataggatccaacactctcttctggtatgtgcaggctcatgcatatgggcacagacatatatgcaggcaaaacaccagtacacatgaagtgaaaataaagtaaagaagttcatttaacacttgggaggcagaggcaggcggatttctgagttcaaggccagcctggtctacaaagtgagttccagggcagccagagctacacagagaaacaccctatctcgaaaaaccaaaaaccaaaaaccaaaaaaaaaaagttcatttaaagggaggggggatactggcactcagtggtcagcaagtctacataatcagtgagtttaaggttcagtgagactgtctcaacagataagatggagaatgctgggagaagacacctaatatctacctctggcctccataaacacacacacaaacaataccccccccatacacacacacacagtcacagtcacagtagctcagtggaagagcacttgtctagcttgcaatattgctccacagagaggagcctgggggaacatacaccgggcaggaagccctgtaggctcctcagggggggattagggtgggcctgtgggcaagagaagcagagactgctgtgggaggggagctgagaccatgctaggaagcaactcaaatctgtccacacagggcgtgacagacaaccaggacagcagtgaacagcagactcgagaggcaggggtgactttcctgacacaggaactcttcccttgcacatgagttcaaagatggtggatcactgtgcctgttagaaagttgtccctccatcgactggagctacttgggagcttctgcccagtcctgctctatacgtgaggctcacatcggagtctagctgtctcctccgaaccaaaggcccttcccagcccttgaagacagttcccataggcttcaggcttctttttcctatttcctacgttcatagtacctggaaatgcctttccagggagggattttccaaacctttcaacagagccaactgacctgaaaaagagttcacctcatctagaaaaagcctatgacggcctgaacgcgcaaggaaggtgtgtgtgtgtgtgtgtgtgtgtgtgtgtgtgtgtgtgtctgtctgtctgtctgtctgtggctctgtgtatatgtgtggtgtttgagtcagggtctaagtatgctaactaggctggtttcaaactcatgagctcaaatgactcgttcgactcagcttcccagctaacagagactaccggctacaccccaacccagctctaacttgccccctgcaataattctacctggtgaatttgggttccccatctctgcttatgaaggactctgcattgttagtgttctccagccacaccccatccaaagcatcctgaattctagaagaaaatccagggtacatccttaaggaatgttccccagcctgctcccagagaaatccagtcagcaaaccctcacaggctgcctgctagacaactcgaagaaacacacacacatatcacacacagagagagacacacagacacagacacacagacacacagacacacagacacacacagacacacacacacacacacacacacacacacggctagacattttgcctgtcccagggagagaccccagtcttgtgtagagggaagaggagcctgtgtggatcccaacaggaagaacactttgcgtcgcttacttcttcttcccacccaacctccaacagcaggaccagcttcccatcctcctggcccagagcccacagtgctttctaaatacatccctagcttatgtctggcatcattccaggcagcatccgttcccgtgggacatgcatccctagagcttgcgtgtacgctgtctgtgttctgtttgagtgcctgtctatgcagcagagcagtgtggtcccacctgggcatatgtctatgtctatataggatgtgtgttgcccatcatgtgtacccacagtgcgggtacacatgagggtttctgctgccttttgtagccaagaatgagggagccattcatcccatcgctgacaatgcactcttcccagtgtgttagctaggccagctccctttgacagcatctttccaccaggccagagccaaccctacctaaggcttctctctagggtttgatggagaggagaagtacccaagctcctgtgtatggggagtggctttaacacttgtcgagcttcaaaaatgtttgacaccttctgttgatttataccacactagcttcctcccatcttctcctcctctgaagactttaccaaaacaatacctgttggcatggaggaagagacagaccctcacccccttacctgtcccagtgggaatatcgcactgattgaacttcaagtggaaaggaagttcactagcctagataaaaacttgagccgttatcatgaaaggcctttaggccagacaggctggctagactcacatgctcccctagataggttcggctgttaccaaggtgaatcatcacatctccaccatctgcctgatgcctgtgctcaccagttcaccccacagcttccccctccacctcctactgcagagtcagagtcaaatagctctactcagttctactggaaacaactccctaaagggatagagagcccaagttagactccagaggcagagtttacagacagatgcaaacgtgtaaatccctgctgagccccagatggagtcaacttgggggccttgaaggaaggcaagagtttagagaggtggacttgaaaaaggagcgaaggtgacaggaagctgcctgggttgctggggacaggtggctgtggcacacatacctgaggaatagcatgtctggtgcagtgaagtcgtaggtaaggtctaatacatcaaaggagtgtacatttgggagaaatttatttttgcagggctgaggctcaaactctgggccctgtatatgctaggcaagcatctacctgctgagatgcactgccaggactactttagataaaaatgtaaaggccttctacctggggcattgaagccctatctaacaggtctattgttttcaagagttgtagggccattctctctctcacaggctgtttttgcacacgctaggcaagggctctactccaaaaatgtttgtttgttatagagacccaagcaatacttgccagcctggaactcatgtagatgaaactgtctttgagcccttcatctcctggctcttctctctagtgttaggataacagcctgagccaccatacctagccatatatataaatggttttactattgtatacgatatcagaaaaacaagacaaaagacacctgtttcttacaggtgatggggagtcattaaaggacactagatctatagggcctagttaggtgtggttatttgacctgtgtaggtgtagatttggtttgtttgtttttgagacatagtctggctataccgacaatggaactcaaatcgtgggcttaagccaccctcccccctcagctcctgagaagtgcagggctgggatgtgagtacgaggaagctccccctgtccactgggtaggaagtggaaaagaacagaaacagtagttagaaaaggacccataaggccggagcgaggctccaaggtcaagagcacttgctactcttgcagaggactggggttcaattcctagcacccacatagtgatttccaccatctgtaacctcagttccaaggaaaccagggccttcttctgacctccatgggcactaggcggtcacatgcacacatacacacaggcgcaggcaaaactctcatacacggaaaataaaaaggtttgaagtctaatttaaaaaaaaaaatgaaagaaaagtaaggggaaagacccatagagagacaggatgggggacaggataaggtgacggcagaagaagggacactggagagtgggtagatagtgctgccattgtaccatgtgtccccatcctctctgaaagagccacctgctctagggaccaaaagaccaagatggggaatcagtttacccatcaggggaagtgagtgtgtcacccacaacagtgtgcctggtggcaagaaagatttaaggtaaccatgaaccaacccctactggcaggagcccctcactctcctcaaagggggtcagcacagagatgagatcgccagagcctagaggacagaacagcccactgtctcttacttccctggggcccatcacttatatcactgtgttttgaacccatagtagttcgggtgtaattggttttgtattgcccagggaggaggttgaccagggcagggcagggcaggaagaacagagtaaggagctgaggaaacgcaggtgcagggcagctgtgagtgaaaggtatgaaaacaggcaccctgtcttcctctgtggttagcaggcaaacaacctgagagctggggtgatggagggcagtggcagatggggaggaggacgcggaggtagggacttccggagatataacaggcacgcccccttcttttccactcagaaaacgcttcctccctaccctgcgcctagtctccctgtgtgtgactcatatttgcctccgctgctgggttcctgtgcctagggagtttactctctgcttgggaagtagctggaaacttaggctccgcccctttcccagaagcctttggagggaagtgtgggtagtagctctcattgtagcgttattgattgactaaagacaggcaaacgtgcctttaagcaaacctcctctttgagcaagacaggtctgtaaaataagaggaagattacatacctcaagcgtgtgtggattaaaccaaataggaggccatttcctcagtttcagcaataatcaagacaggaagaaggggagaaatttagaggaagtaagccagctacatcagcactcaaccattccccacccccagtgagagcttagatttactacccactgtccttacagaattggaatattggcttcttgttcctatcaggttccattcccaaatgtcagtactgactgcaatccctaagccttccatctttaagaacaccctaccactttgtgagtgactactggtccagtttacatacaaacaaacgaacaaaaacgaaagaaaagaagagaaaagaaaagacctgaagtttcaggccagggatgtggctcagtggtggaacagttgctcagcactaccaaaaattagaataaaaaattatatttaagagacagggcggggctggtgagatggctcagtgggtaagagcacccgactgttcttccgaaggtccagagttcaaatcccagcaaccacatggtggctcacaaccatctgtaacaagatctgactccctcttctggagtgtctgaagacagctacagtgtacttacatacaataaataaataaatcttaaaaaaaaaaaaaaaaaagagacagggcatgggggcatgtgcctttaatcccagaacccagcaagcagagactacccaaagctcaggtcaacctggtctacatagtaaattccaagctagccaaggctatagagggagatcctgtctaaaataaatatgcagaagggaggaaggagggtaaagatggcatgtttaaggacaggccaagaggaaacagaatagtacagacaaaaagcattagcctggaaggacaggaaacctcacaggtggcagcttcctctcagaggaaaaaagaagaagaagaagaagaagaagaagatatggctatcgttttcatttctctttcttttggtccttacagtacaaggaactggccttctacagtaacagcacggagattcccctacaggacagtaacttctgctctacagtcgagggacccttactgacgtcctttaaggcggtattcatgcctgtggcctacagcctcatcttcctcctgggtatgatgggaaacatcctggtgctggtaatcctggagaggcaccggcacactcggagctcaaccgagaccttcctgttccacctcgcagtagccgaccttctcttagtcttcatcctgccttttgcagtggctgagggctctgtgggttgggtcctagggaccttcctctgcaaaactgtgatcgctctgcacaagatcaatttctactgcagcagcctgctgctggcctgtatagctgtagaccggtacctagccatcgtccatgctgttcacgcctaccgccgccgtcgactcctctccatccacatcacctgcacggccatttggctggccggcttcctgttcgccttaccggaactcctctttgccaaggttggccaacctcataacaacgactccttaccacagtgcaccttctcccaggaaaacgaagcggaaactagagcctggttcacctcccgtttcctctaccacatcgggggcttcctactaccgatgcttgtgatgggatggtgttacgtgggcgtggtccacaggctactgcaggcccagcggcgccctcagcggcagaaggcggtcagggtggccattttagtgacaagcattttcttcctctgctggtcgccctaccacattgtcatcttcctagatacactggagaggctgaaggctgtgaatagcagctgcgagctgagtggctatctctctgtggccatcaccttgtgtgaattcctgggcctggcacactgctgtctcaatcccatgctctacaccttcgctggcgtaaagttccgcagtgacctctctcggcttctgaccaagctgggctgtgctggcccggcctccctttgccaacttttccccaactggcgcaagagtagtctctctgagtcagagaatgctacttccctcaccaccttctagatcccggaagtctcggggcccctgtctgtttctgttttccttgggaggataaagtggtggcggaacccatccaactcgagcttgggccagtgtccccagatgggaaagctagataaactctctcaaactttcccaaaggggaaagcagcccaaaggcaaagcaagctatatccaggccacctgtatcaccttagatgaagagaactccatacacctcccatcctaaccagctaaagctaagctcagctttatttcttcctggccatagggacaaccacctctgctgtggcccacagtctcatcttcctcctgattatgagcccagactctcctcccagaatgtattccatcatcttaaagactactggctgccacagctacccaccactcctataccacagaggaatagccagctggcggcggcagactatggccttaatgtgcctgtctcataaatacagacttcatgccagaccttcaaccgtgcctttctcttaaccaagcagaaagctgaaaccgatctactttaggtagctgtctggttccaacctaaccagcattgggtcagccccatgttactggatcttggattacagactgagggcaagttccagaaggttctggaagctagccagtatcctaagaagagtaaagggcaagccagcaggaaagaggcccagtggaaaagtggaaagacaccttttccaggctctaaggaagaacaagtaaaaatcaaacccagctgtcttctccacccaatgtaccaaagcttacagactggtggggaaatgagatccagggccctcgtggattctacgcaccaatggggaaggaagccaacttgcctggggaaagcaagatagcaaagtggtcctagcctcgagagaggggacacctagctaagagaatgacgacagaggttcctgtcttcattaggcagaggcaatataagaagccaacctgggcaggcaagtcctcaaaccccaggaaggcagtaccctgcccctgggagggtaccactcacatggaaccagaggaagctgctccatgcatacataggggaagttagcaggcaattctgagctcggcttcctcccagccaccgatctgggggcgtgggggtaggaagcagagttgcctagtaccactcaagccaaccgtacaagctccctgggggatcccactggggaaaccaatgctatagcttcagagactgtatcctcattgcagaaccgtgaagacacctggggacccccttttctgctcccagcatccaacaaccagctgggaagaggcaaaccgggcacagaaataaaaatgcaagagatggcatttttgaattttctctttttaataaaaaggcacctataaaacaggtcaatacaggcagagacccccggaacaagcctaaaaagtgtttcaaaataaaaacaggaagatgtcttcacatattgtatttatatatttatattttatatatatatttatataatggtacaaaatggctggggtatggccatggatggagggagaaggctggcctgtggagatcaccttgggaagctagtggtagaggtgggagacgagggcacaagaagagggcattgggccctttgtggccggagccctctccttggagcagggcaggctagacagtctgggcagggtagggatgtgggtgggggcacaaggcccagatggaagcagggagggcagtgtctggcaggaaggacaggtttccacccacctctcaacacaagagaccttggctatggtccctgggaggagcaggggaagccaggggcctgcagccagctctggagggggcttggtgcctggcctggctgatggtggacagcaccagactgggagaagtgggcacaaattccctttgtattacagctgccaaggcaaaaccaggccctgcaggtcagaaaggctggggacagggccctggtaaaagacaccctgtctagaatggcccttggccctggaggcaggacaggaaaggccttagccagggagctgcccgccaccttacaaggcaggaaaggacgtgagaaaaacagaagtagtttactcctggggccaaaggggacaaaacacccattcctgtatggcttgagtctgaccaggggcgggtgaggggctctcctgggaagtcagaggagaggcagtggctgtgtctggtgggcatagacagatctggtgcatggccctgagccctggacagaaggaccttgcagagagtaggcaggcagaggaggcaacaggatgttctcgctcacactgccttccctcgctctgcactagaggtggagggccaactctgtaccttccttctttggtgagaagcaagtggtggtttctagaagagtccatgccctgaagggttacctggcccatggctactgcagccagggtcccagcatcctaacccctccatagctccattctatggggccacacgctgccccttccttctcgccttttatcctagaatggggataaagggcttcaagttctggctaagatgtagcagcagaggcacccaggctgggggccctatgtcactggtgtgggtaaacacatgtacatgtgcgcacctgctctctggaaatcactcagcagcagacaggcggccgtcgtagagggacgggggtagattctcagtcctcaggggctcaccaaatggaagcctagatggtctgatctcattttataggtggggcttatggagggtgcataggactgtatgtctctgggtccagaggaatgaagggtgtgatcatttgaaagaggggggaaggtttttttttttctcaatcttttttttttcttgtgtgtgacttctatcaagacacagaaatacggcacacgcacaaaccggcacaaaagcccagctctatttacagctccgctggcacctgcccacctggccagctgcctgcagggggcgtgggagaggaggtcagccacgtcagtagggaaaggaaatgaggcagaaggaaaacagggtaaaagcagagagacgggaaggcgagaaacggacctgaagcgccgccggcaaggtgacagtccacgacgggtcagaggatggaagaccctcctctctccccaaggacccccaaaacatagctgaaagcggggaagtgcaaagacaaagggagacagaagctccacgggaaaggggggggggggcagaggaggcgcagtcctagtgacagaaatggagcagagcccgattccaactcctcacccgacacttgccgcttccccctcagctgccagcacagcaggtttccacaaacaccactccccacacaagcccgttcccacccgccaccctacccctggacccaggccatccatcccaacactggaggaaaaacaaaactttttaaagttaacatattttcagtttccccagccccagaccgaggggcctgctagaagggtagattggccatgctgcccggcgttggcaggtagcccatctggctgtccagagacacactgcgctgacgcagagggtgggacaccatgaggttctgctggggtggggggcccatgagggagccctgtggggagagcatgtggggaggctgggtgtagacctcgccccccacacccctctgcttcatcagcataaaattctgctgggtcatgaggccttgtggaggggacatgaccccctggtgcaggccatggggcaccatgccctgttgtgggggcacacctgtcctgcccagcaaggacatctgtccagggtggcacatggacatgctgagcccccgctggaccccctgttggcccgggaggttggggggtcgagacggggtctgctctgccatcatgttctgcaggttcatgagatgcagattggggggctgggccttggggggctggttctcgctcttggggaagtactggagggtgctgcttggtttctcagaggggatgatcctggataagtcgaactcaggaatgccggtaggggtgggccggatcacctcactcagctctgggtcattcagtaccgatgccaccccagggagcaccccgggtgggtatgcgtcgcccatgcggccagtcatgcctttgcccattaggtgctgctgggggggtatgggacccggtggctgggtgggcaggtcctcggggggcagggccatgcctgaagggtagtgctgctgcaggcctgggcccccggccccggtgggggccatggcaccgtgaggttgctgcagccgaggagggaaggacatcatctgggaggagctgggcacagggccacaaggggcatttagggagtctgggcctcctggggccatcatcattgagttttgagaagagcccccagtcccctgtgcattgggatgcagtggaatgttggaccccagaggggtgggggagggcaacatagtagggggaggctcatgggacaggggctgctggcctggcaagttcatgcccatggggctctgggcagcagcagggttcatgtgcatctggttgggctggttattgctgatacctgtgggaggaaggacgaacgggacattagaggccatgcccacccagtttggggaggggtctcccagtccttcccagcccactaaagagctctgggctaggtttcatgaagcgatggtagtcattcaaacggggcctcagagctcacaccacccccatgagcagagactatagaagcatgcagaagccagcatgtccacgggggcaattcctaagcaaacccactgttgccactcccagagagagctctgcctcctcgcacctggcccagagccctgcggtggtgggggtgggggtagcaggggccggtcaggcagcagctcgtcatctgaggtggcgatggtcttgatggcgttgtggtatagcggggtcgagctgggcatggcgtacttggacatctgagacatcatcagtgacagagggttctgggaaggggtggggtctggggaggatgtgaacggtaggctggggttcatgaggccactggaagggttggcgggaggagcggaggagctgttccggggtgcgctaggtggaagagcacctacagaagcggagagacagaaagagagcgggagggggggtgtcactagcgaggttaacgtcccccaaatctccacctcacgtcagacacacccatatcccactgaccacaggttccctgtggtccctacggcccatgcttctccaagcagtttccccagtggggaaagtcctagctccaagtggcacccttcaagatgtttaagaggctccggcagagcatgcccctgcaggaacctacccgccaccaaggctcccacccaagcccacctagatcactcaccctgttccacgttgcccagggtggaggaagagtttatgctgagaggtggctgcttgttctgggagaccccaggactaggcatggctgtcttgggagaggcgacccagcctggagaaggcaccgccatggagggagacttgagcctgctgggtgagccagtgggtgaacgcacaccgagggaagagctgaggacctggggtgacttgagaggtcccggtgggttggcagaaggcaagggtaccatctgggagggagtctggggtgacttgaggttggcagagggtgaggtgaccaggggggagtgcacctggctaagggtgggtgacttcagatgtcccatgcccggtgagcccatctgattaatactgatggtgagatctgaaggccgcctgcctagccccctgttggaggccaagtgcacagacccaggaggattggaggcagggggcagaggcatatggctgagccgggcagtgcccacagtgcccatgggcactgaactctgatcagggctgaacatgtctggagtgttgcccatgtcctggggcatggcttggtaaggtccctggcccccagagaatccctgctggccctggttgggaaactgtgaaggcatgagcatcttctgcggaccccccatcatgccactactgttctgggcccgaacccgagccatctcttcgggactgaggccctgaggacccatcatgtctccagggccccgcatcttctgtgacatcagcatctgctgctggggcgtcatctgcacattcaggttcatgttcatgttcatgttcacattcatgttcatgttgaggttgcctggccccataggcgggtctacctcccgcagcccagactgtcccattggagggctcaggaggccccgacctccaccaaactctatgcccatgggtgtgccggcgagaccatctcctccagtcatctgtcccgggaacatggcagggtccatctgtcgatgagcctgtatcatccgttccatttccatgctctgtcccatgccgctacctgccatgcccaggggacgctgcatgcccatggaccgcttctccagcaactggtgcctcagcagctcctcccggacacgaggggtcatgaatcgctctgcctccccctgcccacctgggtagggcacggcattctgggcaaagttgctgggtcccccaatagggggcaagtcttcattccaggccatgcctggccttacaggtctctgcatggcattcatgggtacttccatgggcatactctgcatacctccaaatccgggcaccctttgcatctggttgcctgggaaacgggggccagggaagggaggtccaggtcggagctgcatgggatcttggacatccataggccctcggagttgtgcacccattccaggtggccactgatnnnnnnnnnnnnnnnnnnnnccggtggccactgatccccaggtttgctgtggtaaggaggtgggggccccctccccatcataccccccattcccaccatgtcctgcagagggcggcctccgtgcaatccaatctgctcctctttccgccgcttctcctcgtagtactcttcctgcagtttgcgccaggccacctgctcgggcgtcagactgtcctggcccagcctctgcatcatcatgttcatttgctgtcccatgtctccaccctgagggtgccccggcacttcatgctccagagggggacctcctaggctctgtgtctgtgagatcattgactgcagaggctcctcatacttcttcagccccccaggaggggcggagggaggcggttgagcagcagagggcgcttgtgccggtgggcctccctcaccagctcctcccgggggccccttgaggaagggctcagtctccccactgcggagcagcagcctctcgatgtcccgcagtgtctggagggagcgctcccggtgctccagctgctctttggacaggccctcagagcccaccaggttcctctgcccatttccggtgggcgtggcctcccccaatagggcggagccaggggcactgccagggtctcctccaggaggcagagggttgttagcggtggcagccgttggggtgttagggtgggtacccccagtcccaccacctgtactggcagctcccactgagttgggggccaggtcctgactggtgtcttcaggaggcccctccgggggcagagcaggaggggcactgccaggggctgggggtggcggtggcaaaggaggtggctgggactgtggtgtacctgctgatggcgtattcaggggtagtggttctggggtgggtggcactttaggggcctgcaggaggacaaaggtaaagaataagacagatgaggggacatcccaaagaatattagagcctggcaggctaccacacttacctgatccagcttggcccgaggcacattctgctggtggtaggcaaggatggactctgcccggccctgcagcactgcctctgccgctctgcatagggaagcagccacaggcagctcagagatgggcaaaagcaagctggccctcacccaccaaccttgcaccgcacccccaccccccctttgctcaggctggtcagacagacaaaaccctctcacccctcatctctcccaaagacttacgtgttggccagatgggtggtgaagacatagacgaactgtgacggaggctttcctgggacgcccccacccccacccccaggaacgtctggccgaaggcctggctgggggccatgttgggggcctggtgcactgctctcactgaggggcagttgggcagtttggccaggacccaactgtggggtcaccatggctgggtctgctacattacaatctgtaagaggaggaagaaaggagagcgggtgagcggcccagacgtgggaagaaggccaatcagccggtgttcctgccctcagatgctcgctcactgcctcaagcccatgcccagagggtcatctgtccctacagtctccgtttaccagcctggctttccagttcacttaacctatactaacctttgctcaagatggccaggatgcagaaagatgaccatggagagaggtgagaaaaagtgacagaaaccccaaagctctgctctaaagctcccacactcaagcacttgagatcagtcagtttctctgcctctctctctctctctctctgtgtgtgtgtgtgtgtgtgtgtgtgtgtgtgtgtgtgtatgtgtgtgaatttactgtctaaatgacccagccaaggggaaggtagggaggacatagtagtaactgatgattcaaaccacagacagattttcatcttaccccacgattcactaactgtggttttacaaaacagcatttgtttaagcctcagtttcttcatctacaaaatgcaaacactactcatctcccacgtgccctgcccaaggacaagtccttttaaaaacatgggtactacgccacaaagcaaaacatcagtttcaacaagagtcagaaaggctttcacaaatgatcaacgcaagacttcggtcacctctgatgaccaagaatctcacggaggtgttcccatcaacaacatgcatacacacggatggatgcaggtgagatgaacacagtttgcaaggcacgtgagaaagggcatttgcttctgcaccctctctgaacacgagacagtccttttggattttgcaggggaagggcatacatattgcacacattcagtttaagggcacagggcacatatggagctcaacagagaacactaagtgttggctctcagactttatcatgcacaccacgttagctggacaatgacaatgagcttccagagaacctggctgctctgctttgaaagtcccatcactgggctgattataggcaggtaccactgtacctggcttcctgtgtgggttctgggaatccgaaaccttgcaaggcaagtttctcccaactgagccacctacccagccctcttttttggatttttacagattaatcattagtcacatttaattaaaccattagcttcaggtgatcaatttgactttcagccccactcctttgacgaggatggaatgtagggctgaaagccccaaacctctatcctgctttgattttcccagtcaccaggttccatctagaagctacctcaggactgccagacacaccagtcgatacagcattaaacaaaacagaacaacaaaaaaccacttatccctctggagcttcccaggaaacaagagaagaccaaatatatgtttcacaatatcacagactcacatactcggaacagccgaatattcctcaggagcaagacaaatttcgctcctcggtcacaagcctggcattccgttctcacatagataagacccacgactggtcttcagtggttttaggtgaggcagagatccatggtcataccaagaaaaaacaagttaaagcctccggactacaaacagcaagtgccagcacttcccaaaatcacaagaacttgaccaaggtggcagacaccagaggcctagagtataaatcagagcacacaacaggctcctacaggctacggagagggaagcagagtttatcacaagaaggaattttctagtaccctaacagcaatacaagctagcactgttcaaagtatgtcacatgcctggactcaactttctccttgtgccaaatctatatgacaaagatcacttctatagatgagcaatcagaactcctttctcaagtttacagtccctgggatgtaagtaaaggcgcctgggctctgagcctgtctcattgacagctacctcagtctgccttgctgtgtgaagaattcagttgcatggttgaatgctgctgaatgacacagtgacacaagactataatcccagcacttgggagctataggcaagagggttagaaggtcaaggccagcctcatctatacagtaagcctgaggctaatctgtactacatgaaacctggtcttcactgaattgcattccatctaaaagaggctggtcaagggatcttagctatttcttatcgctctgtatctttcaaagtttctccaatgacacgggataatgttacagacacaaattcggggagacaggagggttctggtcccaggaagcagtgacagattctaccactcaagcatccatactgagactgaacatagctcatacagcactagttagtcacatggggccttggcagtcccagccagttgtagagacttcttacaggacactggtcagtagggtctcctcattccctcttgctgactgtttcctccactgtgacagtcatcattacactttcttcatgggcagctgtgaggactaaactcagtagcaaatgtatctttcttctcctttccttaactcctgcctgtaagcagcacacaatttaagctctggctagcttctcacatgcttagttaggttggaagcaccaaggatgtctcgggcctcaagcacagaaggatggattggaatgagagaaatggctatgaatcctagaaatgcatcatgagcattttctgagtgtcatttagagactggagaaaggaaccagggacacaattaagggtcagttcacacctaggcttagcaaggctttgcaaagccaagctaacagattcccatcttcctgcccatcctccactgaccggtaggtggcagcataggccatgaaatctgttagatgtgtaggtgagttgtccggaaaagggattacctgagagaccttcgacagagggagggagaggggaagggaaagagagagggagggtggcgagggtgtgagcagcactcacactatagataaggaaaaagtccaaagtagggctgaagaagagcctgggctcctagtccttgccatttcttgaacaatcccctaaagcccaaggtaagctccctcaggacggacacacacacacacacacacacataccaggggaagggcaccatgaggcacagcatcaatgggcactcactgtgggcggccgcaatgggcttgtcgtcctcctcgctgtctggcc

SEQ ID NO: 233 - DNA, 2518 bp, Mus musculus
atgaactacccactaaccctggacatgggctccatcacatacaatatggatgacctgtacaaggaactggccttctacagtaacagcacggagattcccctacaggacagtaacttctgctctacagtcgagggacccttactgacgtcctttaaggcggtattcatgcctgtggcctacagcctcatcttcctcctgggtatgatgggaaacatcctggtgctggtaatcctggagaggcaccggcacactcggagctcaaccgagaccttcctgttccacctcgcagtagccgaccttctcttagtcttcatcctgccttttgcagtggctgagggctctgtgggttgggtcctagggaccttcctctgcaaaactgtgatcgctctgcacaagatcaatttctactgcagcagcctgctgctggcctgtatagctgtagaccggtacctagccatcgtccatgctgttcacgcctaccgccgccgtcgactcctctccatccacatcacctgcacggccatttggctggccggcttcctgttcgccttaccggaactcctctttgccaaggttggccaacctcataacaacgactccttaccacagtgcaccttctcccaggaaaacgaagcggaaactagagcctggttcacctcccgtttcctctaccacatcgggggcttcctactaccgatgcttgtgatgggatggtgttacgtgggcgtggtccacaggctactgcaggcccagcggcgccctcagcggcagaaggcggtcagggtggccattttagtgacaagcattttcttcctctgctggtcgccctaccacattgtcatcttcctagatacactggagaggctgaaggctgtgaatagcagctgcgagctgagtggctatctctctgtggccatcaccttgtgtgaattcctgggcctggcacactgctgtctcaatcccatgctctacaccttcgctggcgtaaagttccgcagtgacctctctcggcttctgaccaagctgggctgtgctggcccggcctccctttgccaacttttccccaactggcgcaagagtagtctctctgagtcagagaatgctacttccctcaccaccttctagatcccggaagtctcggggcccctgtctgtttctgttttccttgggaggataaagtggtggcggaacccatccaactcgagcttgggccagtgtccccagatgggaaagctagataaactctctcaaactttcccaaaggggaaagcagcccaaaggcaaagcaagctatatccaggccacctgtatcaccttagatgaagagaactccatacacctcccatcctaaccagctaaagctaagctcagctttatttcttcctggccatagggacaaccacctctgctgtggcccacagtctcatcttcctcctgattatgagcccagactctcctcccagaatgtattccatcatcttaaagactactggctgccacagctacccaccactcctataccacagaggaatagccagctggcggcggcagactatggccttaatgtgcctgtctcataaatacagacttcatgccagaccttcaaccgtgcctttctcttaaccaagcagaaagctgaaaccgatctactttaggtagctgtctggttccaacctaaccagcattgggtcagccccatgttactggatcttggattacagactgagggcaagttccagaaggttctggaagctagccagtatcctaagaagagtaaagggcaagccagcaggaaagaggcccagtggaaaagtggaaagacaccttttccaggctctaaggaagaacaagtaaaaatcaaacccagctgtcttctccacccaatgtaccaaagcttacagactggtggggaaatgagatccagggccctcgtggattctacgcaccaatggggaaggaagccaacttgcctggggaaagcaagatagcaaagtggtcctagcctcgagagaggggacacctagctaagagaatgacgacagaggttcctgtcttcattaggcagaggcaatataagaagccaacctgggcaggcaagtcctcaaaccccaggaaggcagtaccctgcccctgggagggtaccactcacatggaaccagaggaagctgctccatgcatacataggggaagttagcaggcaattctgagctcggcttcctcccagccaccgatctgggggcgtgggggtaggaagcagagttgcctagtaccactcaagccaaccgtacaagctccctgggggatcccactggggaaaccaatgctatagcttcagagactgtatcctcattgcagaaccgtgaagacacctggggacccccttttctgctcccagcatccaacaaccagctgggaagaggcaaaccgggcacagaaataaaaatgcaagagatggcatttttgaattttctctttttaataaaaaggcacctataaaacaggtcaatacaggcagaga

SEQ ID NO: 234 - protein, 372 aa, Mus musculus
MNYPLTLDMGSITYNMDDLYKELAFYSNSTEIPLQDSNFCSTVEGPLLTSFKAVFMPVAYSLIFLLGMMGNILVLVIRHRHTRSSTETFLFHLAVADLLLVFILPFAVAEGSVGWVLGTFLCKTVIALHKINFYCSSLLLACIAVDRYLAIVHAVHAYRRRRLLSIHITCTAIWLAGFLFALPELLFAKVGQPHNNDSLPQCTFSQENEAETRAWFTSRFLYHIGGFLLPMLVMGWCYVGVVHRLLQAQRRPQRQKAVRVAILVTSIFFLCWSPYHIVIFLDTLERLKAVNSSCELSGYLSVAITLCEFLGLAHCCLNPMLYTFAGVKFRSDLSRLLTKLGCAGPASLCQLFPNWRKSSLSESENATSLTTF

SEQ ID NO: 235 - DNA, 33296 bp, Homo sapiens
aagaaagagaaagaaagaaaagaaagaaagagaaaggaaaagaaagaaagaaagaaaaggaaagaaagaagaaagaaagaaagaaaaaagaaaagaaaagaaaggaatgaaaacaccttaaacaccaccagcttcatcgtgaagttctgttgctgaagtccctgccatgtgtctcagttgccccctctgccatccaaatgcccagacaggctctctgggcctctcagtatccaccctcattgccttctcccacatcttcctctgctccagtccagacaaactgctcaccatcccttccccaagatgtgcatttaccgcctgcggacctccttccctcaaagtcctgcctgaagttccttcctttttgacctccctttaaaaagcatgagtgggcctgacgcagaggtgcatgcctgacatccccgtgctttaggaggctgaggaaggaagtttaaggccaggagttcgagaccagcctgggcaacatagcaagaccttatctctacaaaaaaaaattaaaaattagcctggcatggtacacacttatagtcccagctgctcaggaggctgaggtggaaggatcgcttgagttcaggagtttgagactacagtgagcgataattatgccactgcactccagcctgtgtgacagagcaagaccttgtctctaaaaaaaaaaaaaaaagcatgattgtgtgtgtgtgtgtgtgtgtgtgtgtgtgtgtgtgtgtgtgtatgagagagagagatagcactttggacctatggaggatttctatttggaaagaaaaaggcttttacatacaagatattatttaatagcaaaattggccatgcaggtattttacaattgtacatattaggaaactaatgctcagagaagttatatttgtaattttcaaactggggattgtgacttatgtgtggacccatgaaagcagtgtgattcattgaccgctattaaaaatagaaagagggtcgggcatggtggctcacgtctataatctcaacactttgtgaggccaaggtgggaggatggcttaagcccaggagttccagaccagcctaagcaacataacaagaccccatctctacagtaaatttaaaagttagtttggtgtggtgatgcacacctgtagtcccagctactcaggaggctaaggtgggaggatcacttaagcctgggaggtggaggctgcagtgagccatgattgtgccactgcactgcagcctggctgacatagagagaccccatctctacaaaaaagggaagaaagaaagagtgagagaaagaaagagggaacgaaaggaaggaggaaaggagggaaggaggaagagtagaaaatatgagtatgctacccatactaagcagtgtttacaaaacttactgtgtatttgtgtgtatatgttcatcacacatgtccaactagcttgtgatataaaatatatttcttcctatgggtcatgatcaaagtgacaggattacatgacatgctgaaagctaactagtagagctcatgcattacttattagagtagagctgagaccgaccagagagatagaggtgcaacctgtcagagcccgggaggcaccacagaaatctcaacggtgccagggtggggcccagggaggccggtgttctgggaaaaccaactgttgtgtgctggttgtatgaagtgctgtgttgttgtgggttgtgtgctggttgtatgaggtgctgtgttcttcctgttgtgtgttgtgtgctggttgtatgaggtgctgtgttgttgttgtaggttgtgtgccggttgtatgaggtgctgtgttgttgctgtgggttgtgtgctggttgtatgaggtgctgtgttcttcctgttgtgggttgtgtgctggttgtatgaggtgctgtgtcgttgttttgggttgtgtgctggttgtatgaagtgctgtgttgttgtgggttgtgtgctggttgtatgaggtgctgtgttcttcctgttgtgtgttgtgtgctggttgtatgaggtgctgtgttgttgttgtaggttgtgtgccggttgtatgaggtgctgtgtcgttgctgtgggttgtgtgctggttgtatgaggtgctgtgttgttgctgtgggttgtgtgctggttgtatgaggtgctgtgtcattgttgttgattgtgtgttggttgtatgaggtgctgtgttgctctggagagacgtcaactatggcaccctttgtgtggagggactgaaggccctgctgggtggttgggagctccaggttggaaaacaagctgtgtggggacgagtttaccaattggtatatggctgtgtaccagtcctacgtggcctagagcggtggttctaggagtgtagttctcaggccagcagcatagcgtcacctggacactcttagaaatgcacattatcaggtcccaccccagacctcccgaatcagacactctcgtggtggggcctggcaacctggaggtaacaagccctcctggtgactctgaggcataaagtgtgaggagcactcccctggggatgcctgtttggcattctgtgtttggcgtgtctttgcgcaagcaggcagggtctggtctcagagcggccttgctgggaagcagacatgctgggcctccagtgcagcgtttcttctgtcacccactcagccttacagcctacccagcgcatgcgcccacagcacttaggtgcgaaggaatgctgcacgtttcccccattccctgtgccttccacactgctgactccacccacactaccttagcaacacggtagagttttgcatattctttgaaaatgtgcccagttgcatgtgaatatgagcatgccaacttgcatgatgtgtctgttttgccttctctgttagacaaggtgctcctccatcagaatctcgcctctggctgccgcagtactcagtatacaaacacctgatccaagcaccagactcactctaaccctggccacacaacctgccccaggccgacgttcccaagctcatttgtggcccccatgaccttgtggtaaccttgatgtgcctacccagcacctgcagcccatttcctccctgcaggactctacctgtttcctaacgagaggggagctgtgcgtgggtgcaggctgccggcaatgacagcctttaccaccccacttcctgtgttgacttgtaatggggtgttgggtccctgctgtctgagtgagctgtgaacattcatgctacttcccattactgtctgaagcttggtttccacatctgcagtgtggtaataaaaatacccaacactttgccggacgcggtggctcatgcctgtgatcccagcactttgggagaccaaggcaggtggatcacctgaggtcaggagatcgagaccatcctggccaacatggtgaaaccccgtctctactaaaaatacaaaaaattagctgggcgtggcggcacgtgcctataatcccagctactcgggaggctgaggcaggagaattgcttgaaccagggagtcggaggttgcagtgagccgagatggtgccaccacattccagcctggcgacagagcgagactccgtctcaaaaacaaaacaaaacaaaaaacccaacactcaaagactgttcagggaatgaaaagaaatgatgtgtgaaaaacctatcatagttcatggcacatagaaagtacctgatgaggagcctgtgcaggatttagccatagttttccccttagccagccaggtaagtgcctgtcctttgcaaaatggcgcctctgagagacgggccgtgtggtcttgtggagggagccctggatttggtgcctacagggctgacttcaggctctgactctgcaacgaaccctccctgcaatcacgagcaagaaaatgagactctgtttccttgtcctcacaaaatacggccaggagtgatgccaatccctccggcacaagccgcttcaaggactacatataattaaatgtgaagattaagtgaaatataaagattaagtaacattaaatttaaactttcatgggactgtgtagaccggtgactgctatgcaagtctatggcgagtttccttcagtgctgagaggtataccctactcttcctgaggctgatgaggtagggacctgggagctctgttctcagctgttgggaaagacccagagaaagaagagaacaaagtctctggccatgtcagagagggagagagtcctaggttaatagaaggggaaaccccagcccgttccctgtagcagcaccccaaaactgtgtggaacagcttactttttctgtggaatatagaaaatgaactccaagacaagtgattgtatctaatctctggaacaaatagaaatttaatgtaatccatggactgtaaagtataattactgagaaaaatacacctgagctgatgtaagcggccacccttgcctaaaccagacacaaacccagtcttggcggaagtatcagtagtctttctgtctttttttttttttttttttttctgagataggatcttgctttgtcatccagcctggagtgcagtggtgcaatctcagctcactacaacctcgacctcctgggcccaagcaatcctctcacctcaacctcctgagtagctggaagcactagtgtgcaccaccagctaatatttttattttttgtagagatggggtatcctatgttgcccaggctggtctcgaactcctgggctcaagtgatcctccccccttgacctcccaaaatgctgggattacagaggcgagctaccatgttcagcctccagtggtcattttgacgagaaggctagaaaacaatttagcctcaattagactgcctatggggtggggattgggatcctgcataggtgaaatataaacaagttgcacactgaaataaaacctgagctgcctgacctggaagggtcctctgccatccgattgtcacacacagatggaacctctgacatctcctcttcaaaggcaaaggatcgcagcttaagcgttgccctctctatcctagggagctagtctgactttatgtgtgtgaagattgtaagatcatggtttctagtagaggcagtaactctctgagccttctcaaaacaatattagaactcacggttgctgggcatggtggctcatgcctgtaatcccagcactttgggagtctgaggcaggcggatcggttgagcctaggagttcaaggccagcctgggcaacatggtgaaactctgtcttgacaaaaaacataaaattagccaggtgaggtggcatgtgcctgtagtcccagcaactcgggaggctgaggcaggaagatggcttgagctcaggaggtcaaggctgcagtgagccatgatcgtaccactgccctccagcctgggtgatgaaatgagatcctgtctcaaaaaaaaaaaaaaagaaaaagaaaaagcctcaaggtcagaaggtatttaccactgggggcaaactgagttgactatcaaaggtcagaggctaacacaagtagaccctgggaagctgtagtgtgttcaccatctggagagaagaatgggatctctgaataggcccaaaaagtcaaagacttcaggtgacagtcacagatgtgtctaatgtgtgacgcctgagtcagccatagagaagctggtaggctacctctctgctgcccaaaccatcatagctgaaactactggccagagcctgctgctatagcacctgggaagcagtcttaagcctcccccaaaactctttttctaggcctacagcacatgtggaaaatatagagaactgtggaaagagtaggagaggagaaggccataagagcagctcctaccttgtccagtacatgctccaaccacttccttgctcctccccctgccctatctcatcatcattattgccatagccacaccaccatacacagaaggcccatgatgtgccaggcacaaggtaattctttttttttttttttttttgagacggagtcttactctgtcaccaggctggagtgcagtggtgccatctcggctcactacaacctccgcctcccaggttcaagtgattcttctgcctcagcctcctgagtagctgggactacaggtgcccaccaccacacccagctaatttttgtatttttagtagagacggcgtttcaccatgttggccaggatggtctcaatcccttgacctcgtgatctgcccacctcagcctcccaaagtgccgggattacaggtgtgagccactgcacccggccatgcccgggtagttctgtcgcccgcactggagtgtggtggcgcaatctctgctcactgcaagctccgcctcccgggttcacgccattctcctgcctcaacctcccaagtagctgggactacaggcacccaccaccacgcctggctaattttttgtatatttagtagagacggggtttcaccatgttagccaggatggtcttgaactcctgacctcgtgatccacccacctcagcctcccaaagtgctgggattacaggcgtgagccactgcgcccggccagataattctttctacacattttttccaagcagttctcatcatgtcccacactgtccaccctgtccccctctccaggcacaccaagccttcactctctccaagcctccagtggccaagacttccatgaagtctttcctgacctttgggtatagtaagtctctaatggcatgaagcagggttctggttttggcttcatcctgtcaatatttgccatcaggacttggatagacccaaggatgacttatctatgttgttatcacatcaccagatgacagaattgggatcagaaaaatttccctttataggttgcaacaatggcccagaaccttcaaaatgaaatcctttaggcatgttattaagaggagtaggaccctgcaggaaagtccaattgtattgtagttacatagttatagaagtatggaatcttttttttttttttttttgagtgtcaccaaggctagagggcagtggtgtgatcatggctcattgcagcctcaacctcctgggctcaagcgatccgcctatctcagcctcctgagtagctgggactacaggtgtgtgccaccatgcccagctaatttttgaattttttgtagagacgaggtttcaccatgttgcccaggctagtctcaaattcctgggctcaaaggattctcccatcttgacctcccaaagtgctgggattacaggcatgagcaaccacgccctgccaagtatagagtcttgaacaaggaaatgcatatcgtcctatattttttcctagtcagataatatctagaccattaaccagaaatcacccagaggtcaaaaaacagggcgtcaaaggacccagaaaccaagtctgcaaataacgactgaagacactgtggaagtgtgtttgggagacaacaagactctcaggatgtgctggctgtcttcagaggatgcttattggaagaggagtcagacagtccagacagaaggcacagccaggacctctggagaggagttacaggaagacatattttgactcatcataaggaataagtttctaatcatgaaaccatcctccactgaaacatgatctattgaaaggagcaaatgtctcaccttcattgatgttcgtattcattgattctgggtgatcatctgataaggatgcagtgacgagaatcttgcatttgctgggggtgggggtgtggttgaggatagtctggtttatattccaaagttcctttcaattcctctatgattctatacgctgtactccttcctgatcaatgtccctagccagggtggccaaggctaagtcaagtatgctaagggattggaggggcagggatattgagaatagggtgaatggaaggatgaggagttcccagcaagcttgggacacaggaaaccttggggcagcttcctcctggaggtttcaggactgtacgtgctggagaagaagtgtgatgccttgtcctgaaagccgtcttctttgaaagcagcttctaaaggcagtgaatggagaagagcgaggaaacgaccccaataccaccaacagaggctggaaactcctcaggctgtttaatcctaagaatgatgcatctgttggccgggcacggtggttcacatctgtaatcctagcactttgggaggctgaggcaggcggatcaccttaggtcaggaattcaagaccagactgaccaacatggagaaaccccatttctactaaaaatacaaaattagccgggcgtggtagcgcatgcctgtaatcccagctactcgggaggctgaagcaggagaattgcttgaatccgggaggtggagtttgtggtgagctgagatctcgccattgcactccagcctgggcaacgagagcaaaattctgtctcaaaataaataaataaaaatacaaaattagccgggcgtggtggtgcatgcctgtaatcccagatgctcgggaggctgaggcaggagaatcgcttgaacctgggaggtggaggttgtggtgagccaagatcatgccattgcactccagcctgggcaagaagtgcaaaactctgtctccaaaaaaaaaaaaaaaaaaaaaaaaaagaatgatgcatctgttggggatgcagtggggtaagcatcttcagtaagcaaggtgtgaagaggggaaagagggaaggtgaatatggaggagagggtgaaggagggcactggaaagggtagtaggatcccagcaaagggcgatttggctgaaagggagcgtgataacaagggtgggggtggggccaagaagcagccaccatgtgtgggtgcctctgtgcgtgcagtcatctttctcacatcattgtggatcaagagaggaaatgcccacttctggaagaaaaagccacaaaatgagacttggaagggaaattgatcaacatctacaaaacggcttcttaaaggaagcggccctcagacaggacagagttgagggaaaggacagaggttatgagtgcctgcaagagtggcagcctggagtagagaaaacactaaaggtggagtcaaaagacctgagttcaagtcccagctctgccactggttagctgtgggatctcgggtaagttgctctccctctcggcctcacggacctcctgaataaaaattgagggttagactggatgatctctgaagccatctctagcttggtagtttatgaggttaataatttatgagcaaacaaagttaatttatagatagaacatcattatttttgagtcagaaaatgactctgtaactatgtgcttttcttggtgatttcactttttttttttcttttagagacatggtcttgctatgttgcccaggctggtatccaactcctggcctcaagccatcctcctgcctcggccttccaaagttgatttcatttttgtcttccagtattgttttactgttgttccctttgaaaaattctaacctatcttttctgaacttgagctgagaagggaaggggttttgcctctgttgggcaaaaggatggtggcaagtagtgtgaccaagtgccctaacttgccaggacttaggggtttcccaagtcaagggacttttcagtccttggcagactggaatggttgatcaccctagtggtgaggaaaatgaaggtttggaggtggcttggaggagaggttgctgggagagctcttctcctgttctctgttgatcaggagtttccctcatcaacctgctgactttgcgtggtggtttcattacaagttgtgagccccttattgggggtatagggaggagaagtgagggcagcctttaaactagtcataggccccagttgagacaattattgccgggaaagaagctgaaatgcttgactagcactgatgctgtgggggattttccctctttcttcaaaaaaacagaaaagacccagtggaaaaaaaaaaaaaagtgatgagttgtgaggcaggtcgcggccctactgcctcaggagacgatgcgcagctcatttgcttaaatttgcagctgacggctgccacctctctagaggcacctggcggggagcctctcaacataagacagtgaccagtctggtgactcacagccggcacagccatgaactacccgctaacgctggaaatggacctcgagaacctggaggacctggtgagtagacacgggtagcttcctgtcgccgaggccctgtctggaattctaacatcctttgccagagtccgagggagaggggacagtgtgggaatcctctcccactgtggatctgtaaaatctagacaggtcagtcagctcccgccctttaagagtttattttccattctgtggaagaagcagataaggagagctgctgtccttaggagacatcctttagaggaagctggaagacacgggttcaggccctgcatcctcctctgagttgctatgtgactgggaacaggatacttcacctctccattctttctctccttttctcttagggtcggaatatggaactagacaggaaagtactttggaggttttcttaccgtaaggaggctggcattgctaatcagtcaatgaatgcatagctgttcgtctctggccatatgattatgtcatcagggcactacattctgtgttgggtggagaagttgaggacctggtctttgccctcaaatagcttctgctctggccagagaaaaaaatcactcactggaagctattaggcaacaattatgtgctaaactgagggaatgtgagaccagatggtagcaaggaagaggatcccagcaggctggagtcagggagcagggtgagaaaactgttaatctgacaaatgtcttggaacctgttgtagaatctctagagataaggtattcttggaaaggtttcttgggtgggctaagaaaatggtctccagcactacgctgccaccactcaagtctctccagtgaagcgtagtggtgcagttgacttggttgtcactgggctcccagaagatgtgtgtgtgtgtggagcagctcaaccagagaaacacagggttccttgtgagccgacggcagaggctggttgtaagggtttcttggaaacttcttcactgtcttttctccccctggagagaggacttgtttcggggctgcactctgggttagatcatgaaggagccaaaccctggctcctaccaactctcctgtcccaaacttaccctaagatattgtctgactccctcctgctcccccggctggagtggactttgtggagtggactttgtagttccaccaaccatgttcccagacttgctcagagaagcccgcctctcgcttgcccagatcccaaggctgggaagtgtaagtaggacacggggagaaagtgggcagaagggctgactacccaaagcctggcccctcggatccaaaccgtaggtggaatcagagccggaccattcatctaaccaggacctgctacataatttgtgggacccaatgcaaaatgaaaacatggggccccttgttgaaaaattattataaataagaaggcaacagcagagcactaaacctcgtggggggtcctgctgggtgcaggcccccgtgtgactgccccagttgcaagcccatgaagctgccctgagtctaatcacagagtctgggcaataccccaaatcagactaaaaacccgcggccccaaaggggcaatgtgctcccaccctggcccccggtcacagccgctggcctcgcctgattaggttactgggcgtcttcctctgcctgcagcttcaaactgaccacgagccctgacccagttggacatcttagtaaccaactggagacccggcgggtcccagcttctgagaaaccttaagagtttcccctaactgcacgcctcacctcactgagtgacctactagggacaggtgggggcagggggcaggggcagcagggcatgtcccaagaaaacctacatctgggggaaagggacccagtgactttcttcatgtcacacctcaaatgagtgatcctcagccaggcattccaatatctggatccctcactcagggtctagccaggagcccaggagtcctaggaccatctgggctctggagctcttcagccagccaccagtgcctcgttcccccttcacgaatctcctacacaccctgtctccagggccaatgtcccctcagaacacagaccctctcctccgcccccacccactcactgaagggccgtgagcagcttggcagactgtccctcagtgtcacagtacaaaaacctcgggcgtagtggtacaggcaggagaatcttgcatgtagcagcttctcaataagtatttattgatttgtgatgcagtaaaggtcttagctcaccattttcctctggagttagtctgggtccttctattccttctgcttcctattctcctccttgtccttgcccataccaggtattggttcacattccttgaacgctgggttttacactctcatgttgagctaagaactggggccttttggttacacaaacttgccagaaaaaaaaaaaaaaaggaactgggggctcctggccataagccaggttcgtcattctgtattccatttgtcctcttgaactcgaagaccaactcgagccgcttaaaatgtccacttctttaaggcaggggctggagggtggggaggggctgctaattctcatgaatgaaaggtccaaatagaacaaaaattagatggctaagaaccaggaacaagaagattccaggtcctggggtgggtatgccagggacccatcctgctggaaaggccgatcctggcagacctagagcagaccctgtctatgcgaccctcgatctgagagcctccttccaacagaaccagggcctgggctggggcatccacagaggctggtcataaactatacctccagccccaccctgcacaccagccgggaggggaagctgctatagcgcacggtgaagctggtccaagccccagagcctggctttctatgacccctctccatagacaattaccacacatcatgacttcagtgtgaccagagcatcacaggcgacacagcccgtccacgtggaccatctcatttcatcatgtaggtgtgaagaagaggaaccaaaaccagctcaggctgtttctgggcttcatctaggggaaagggaggttctccacccgccccccgcaaccaggtcaaaagtcccagaggaaccccagcagaggaggcccaactggggtgtagttggaagggtcagagatgagggagagccccaaggccaagctgaggatgggtcagggtcaaagtgaatatgggttcgggcatacaaactgcagagtctccgtcaggaactcttgctttccccagggacgcaggctgcagctgatcccactcctctagcagaacggcagaaacagtggccgcatatgtggacctaagaatcaggacacaagaatgagcattctttcaagagtggtggggaaaaatatttccaacccaggagatggtttcaagaggctgccacacacacctgggaggcctgtctgcctgcatcttggactgtgtgactctgtatccaaagggcaaagagacgctggggtgccaggtggggctcccttaagcctaaagacttgctgcagaggcttggagtagcttaaactctccccctaacaccacatccagcacagtacctgcttctgatggccaaaacccgtgggtagagatgaaagaggagtctcacagacttgtccctgaaggctgtgggtgcggcaagggagatgtgacaaatggcaagccagagtctcagatggtctttaggggctgtgggcctcctgaagaaagacggggtaaggggtacagacctaca[450 bp omitted]ttgaaggcagagtccagcctccttcttcccagggcaggaatctcttcccacacacttgggctcaaacgttcctctccttcctaaaggtaccatctcattgctggacagttctgtctgttagaaagttctccctcctttgactgaaacgctaccccctcagcttctgcccagtccttctagactgccccctggaagctcatagcaagagtccattgctgccctcttgcccatggagcttctttccaagccttgacatcagccctcagggactcaagtcttctctgtcccagacactacacccctagtacctgaaaatttcctctatgggcagggttttccaagcccctcaacaaagtggtcatccttgtccagaccaaccaaactgggctggtgtcagctgcccacttacaagcctctgttcacctagatgaaggtaacagtggcccttcggctggccacgtcactcccgtgactcatcttaagcttgtaggtgacaaactcccaagtctttctgacgaactgttgttacctggtcctccctaacttatccctggacgggtaatgttttaaacctgagtcctggcttgtatatttttccccatgcaatttcatctggttaggttggacccatggttccagcttgtaaagaactctgtgttgcctgagagtgcccccaaagctgggctgagagtgctgaagaggaggggacccaggatagatccctgaggcatgctaggcacccctgcccaatgcacctgctgacatagaatccccattagcaaatgtgagctgagctccatgctggccagtgctgggcagtggggcagcctcattatttggagaagtcaggtggggcttggagacttaattatccagggaggagcctgcatcctacagtggagggaaggagaagagtaacattttgggccctaccacaggccaagcactttgcatctccttacaccccccacctcccgctaagcccctcaatactggacactgttacagcccctgctcctccccagtgctcacagcaattttctaactagattctagctccactctcagcctcattctggtcattgtgtttcttgccttctttggggcatgtgaccctggcccatgaccaggctgttgtctgctgggtgcctgtctaggccacatgctggtgtggcccatcttggcacctgtgtctatgcaaggtgcatgttgctgtcaagagtgtgtgtgtgcacgagggcctcaggtttcagaagcttttcatgtcaaagaatgggcacaccgctcacgcaaatggtctgccctgtgctccctctgggcatgggattggagggcttccttcagcagcacatgccccatggtattcaggattcctgattcctcaatttcccatgaggccggagccaaccttgctttattgcctctctccatagtttgggggagattgggggagctagaactcctatgtgtgggaagtggctttaacatgtgccactcccgaacccccaaaacgtctgtttgacacctcctgctgagatgtgctgtcaattcccagcacccctcaaaccagcttcctcccatcttaccctctctgaacgctgccagacaaatacctcttggcaaggaggaagacacaggcccctcccaagccccctctaaatctggttctcaggagatgggagccctagggagatgtcccactgcattgactttagatgagcaataactcagtcagtctggaatctttgaagggcaagaacttgtgtggaggacaagcccagaaacccagggctttctgggtcagacaggctggctggacctaagccctcacccaggcacggccaaggtaggtggagtccagccctgctgaccgccccaggccctgcttctctcctccctgtctgaacggcttggctctgcgtgaagactgctgaattccagtattagtcaagtgggtgtgctcagtgacggtattggaaatagctcccaatagagggagagcactcaagataggatctaggatcaaggccatcaaggttattgggagaaggcagaatgcagaagattacggagtgagtccctgcagaggcacttgtctaagtctcaggttataagggctcctggccttctctgggaaactgctttcagagcaggtcagcacacgtctgtcctacgtaaaacacgtggccttgggagggggacacagaaggcctgcttctgagaccttgccatctggttagaaagtgtcatcccaaccctgggtgctgtaataaatgcacacgcatcataaggagaagagagaattccaagaggggagccgggaaggatgtctgaagatgggattgaattcggctttggaggaagggtggaaattaggcaaatttggaaagaaagacctgctagacagaaggaaaaggccaagcagaggtttggagacaggaatgtgttggggtgttggggaaaggccggggggtggtctagagcaataatttattaatagaagacaaagtttgaaaggtcagaggaatatacatttgggaagaacataaaggctgtgttgggaggttagacgtcttcccacaggtccatggttttcaaatgaaagtagaaccattttcttcaatgaaagcttatgtgtgaagcactgcacaagtcaaaagtggagagctctagtttaaagtcaaggaggggagcctggagccccaacaccactccccactccaggggaaccctgtgacacacacacagtcatgggtactctaaagaaagtccttggagctgggcactgttgtcacatacctgcagtcctagctacccagaaggctggggcaggaggaggatcacttgggcccaggaggtcaaggctgtagtgtgctatggtcacacgtattaatagccactgcactccagcctgggcaacatagcaagacactatctatcaaaaaacaaaaacaaaggcgtgtgtttgggggagaaattccatggaatcctactgcatgggatgttctgcaatgagttctaaactttattttttaaaaaaatgttttgtagagatggggtctcgctatgtcatgcaggctggtcttgaactcctggcttcaagcaatcctcccacctaagcctcccaaagtgctgggagccactgtgcccaggagttctgaaatttagcgatgtgtgaatggcactaagtttggcttactccaatcattttctttttttttgagattgggtcttggtctgttacccaggctggagcgtagcagcataatcatagttcactgcagtcccaaattccctggctcaagtgatcctcccgccttgtcttcccaaagtgctgggattacaggcctgagccaccatgcccagactccaatcaatcttctattgatgaacatgatcacaaatatgactttttcttatagctgactttgctattaaatgtgaaattgaggccaggtatggtagctcatgcctgtaatcccaccactttgggaggccgaggcggggggatcacttgaggtcaggagtttgagaccagcctggccaacatggtgaaaccttgtctctactaaaaatacaaaaaaattacctaggtgtggtggcagatgcctggaatcccaactacttgggaggctgaggcaggagaattgcttgaacccaggaggcggaggttgcagtgagccgagatcgtgccactgcactccagcctgggcaacaagagcaaaactccacctcaaaaaaaaaaaaaaaaaaaaagtgaagttgaaaaaataagataaagacaaaaagcagaagaaaaccactgcttacaggtgatggggaaccagtaaaggactttaaacagaacattgatgcgatgggatttgtgttttagaaaacttaccctgtcctctgtgcaggaggtggacaggagtagagaagctggtggggatgggacccatggagagatggtctcctgagcattagagtaaagagaaggaagaccagactgaggcaatggcagagggatgctgcgggaagggttggcagatggctctacccttgcactgatgtatctcccacacctccttctcacagaccctcattcccccagagccagaaggaaagacccaggttggagaatgggtctgctcagcattaggagtgagtgtgtgacccacaactgtggctcctgagaggcaagaaagccctgtggcacccagtgtgaccatcccctccttgtgggggtgccttgctctcctgaaatgggggcaccattaagccacccggagcctggtggacagagtaccccatcccatcctctgcctccctgggttcatcatttatagtattgccattttgaatccacataggttggttataattggttttgaattgcctggggaggggcttgggtagggagggtgggaagaacagagctgggaggtgaggaggaacaggtgcaggggacagctgtgagtgaaaggtgtgaaaacaggcacatgtcttcctttgtggttagctgggtaaacaacctgagtgctggggtgatggggggggggtgatggggagaggaagaggaggatggggaggagggaacttccggagacatcacgggcacaccccctgcacttggagcaggctctctccttctctcctgccagtctccccgtgtcgccctcactttctcctgcctctctctgcctctgggctttctgcttctgagtgctcctagctgcagggaggttgccagtgatgggaagtagcagggagcctgcatctgctgcccctagaaggaagcccaggcagggttgttcagtgggaggtactggctttggaagtagataaacgtcggttcacacaaacctgatctttagcaagacacatctgtgaaataggaataatattacataccttgagcgggttgtgcatattgaaccagatgggaggctattactgccatttcagtgataacagagacagtcaggaacaggaagacccatgaggagggagcccacaggccaagtcagcacccgcccgcccctagtccccagcacaatgctaagttgcagtgcccgactgttctgctcagaactggaacagatgggtccttgtaccaagcaggtccattccccaaattgaagtcctgtgactccagccgccaaggctgcaggcttccgtacatgaggacccaaaaacacaagctgacttatggggtccagccctccagcacttacaaagctcagccacccgcacgcctcccttcatcagcaccaccactctaaggaatgcggtccctttgacaggcgaaaaactgaagttggaaaagacaaagtgatttgttcaaaattgaaatttgaaacttgacatttggtcagtgggccctatgtaggaaaaaacctccaagagagctagggttcctctcagagaggaaagacaggtccttaggtcctcaccctcccgtctccttgcccttgcagttctgggaactggacagattggacaactataacgacacctccctggtggaaaatcatctctgccctgccacagaggggcccctcatggcctccttcaaggccgtgttcgtgcccgtggcctacagcctcatcttcctcctgggcgtgatcggcaacgtcctggtgctggtgatcctggagcggcaccggcagacacgcagttccacggagaccttcctgttccacctggccgtggccgacctcctgctggtcttcatcttgccctttgccgtggccgagggctctgtgggctgggtcctggggaccttcctctgcaaaactgtgattgccctgcacaaagtcaacttctactgcagcagcctgctcctggcctgcatcgccgtggaccgctacctggccattgtccacgccgtccatgcctaccgccaccgccgcctcctctccatccacatcacctgtgggaccatctggctggtgggcttcctccttgccttgccagagattctcttcgccaaagtcagccaaggccatcacaacaactccctgccacgttgcaccttctcccaagagaaccaagcagaaacgcatgcctggttcacctcccgattcctctaccatgtggcgggattcctgctgcccatgctggtgatgggctggtgctacgtgggggtagtgcacaggttgcgccaggcccagcggcgccctcagcggcagaaggcagtcagggtggccatcctggtgacaagcatcttcttcctctgctggtcaccctaccacatcgtcatcttcctggacaccctggcgaggctgaaggccgtggacaatacctgcaagctgaatggctctctccccgtggccatcaccatgtgtgagttcctgggcctggcccactgctgcctcaaccccatgctctacactttcgccggcgtgaagttccgcagtgacctgtcgcggctcctgacgaagctgggctgtaccggccctgcctccctgtgccagctcttccctagctggcgcaggagcagtctctctgagtcagagaatgccacctctctcaccacgttctaggtcccagtgtccccttttattgctgcttttccttggggcaggcagtgatgctggatgctccttccaacaggagctgggatcctaagggctcaccgtggctaagagtgtcctaggagtatcctcatttggggtagctagaggaaccaacccccatttctagaacatccctgccagctcttctgccggccctggggctaggctggagcccagggagcggaaagcagctcaaaggcacagtgaaggctgtccttacccatctgcacccccctgggctgagagaacctcacgcacctcccatcctaatcatccaatgctcaagaaacaacttctacttctgcccttgccaacggagagcgcctgcccctcccagaacacactccatcagcttaggggctgctgacctccacagcttcccctctctcctcctgcccacctgtcaaacaaagccagaagctgagcaccaggggatgagtggaggttaaggctgaggaaaggccagctggcagcagagtgtggccttcggacaactcagtccctaaaaacacagacattctgccaggcccccaagcctgcagtcatcttgaccaagcaggaagctcagactggttgagttcaggtagctgcccctggctctgaccgaaacagcgctgggtccaccccatgtcaccggatcctgggtggtctgcaggcagggctgactctaggtgcccttggaggccagccagtgacctgaggaagcgtgaaggccgagaagcaagaaagaaacccgacagagggaagaaaagagctttcttcccgaaccccaaggagggagatggatcaatcaaacccggcggtcccctccgccaggcgagatggggtggggtggagaactcctagggtggctgggtccaggggatgggaggttgtgggcattgatggggaaggaggctggcttgtcccctcctcactcccttcccataagctatagacccgaggaaactcagagtcggaacggagaaaggtggactggaaggggcccgtgggagtcatctcaaccatcccctccgtggcatcaccttaggcagggaagtgtaagaaacacactgaggcagggaagtccccaggccccaggaagccgtgccctgcccccgtgaggatgtcactcagatggaaccgcaggaagctgctccgtgcttgtttgctcacctggggtgtgggaggcccgtccggcagttctgggtgctccctaccacctccccagcctttgatcaggtggggagtcagggacccctgcccttgtcccactcaagccaagcagccaagctccttgggaggccccactggggaaataacagctgtggctcacgtgagagtgtcttcacggcaggacaacgaggaagccctaagacgtcccttttttctctgagtatctcctcgcaagctgggtaatcgatgggggagtctgaagcagatgcaaagaggcaagaggctggattttgaattttctttttaataaaaaggcacctataaaacaggtcaatacagtacaggcagcacagagacccccggaacaagcctaaaaattgtttcaaaataaaaaccaagaagatgtcttcacatattgtatttatatatttatatttatatatatatttatataatggtacaaaatggctgggggtgtggccatggatggagggaagagtaggctggcctgtggcgtgggtgggaggagaggggacggagagggcactcggcccgctgcaatctgacccctctctcctcagggcaggaaacacagagtcagacagtttgggggggtcttgggccaggggtggagggctcaagggcacagggcccaggctgaggcagggcgggcaaagcgcctggcaggatgaagggcaagtggccccccaaacacagaggccctggccatggaccctgggaggtgaccggggtgagtcaggggcctgttgtcagccccagaggaagcgctggacctggccgatggtgggccgagaggacagcaccaggctgggagaagtggggcgagttccctttgtattacagctgccagtgcaagaccaggccctccaggccaggaaggctagggacgggtcctggtagaagacaccctgtctagaatggcccttggtcctggaggtggggcgcaaaaggcctcagccagggaactgccctgccacctcccgaggcaggaaaggaagtgagaaaaggagaagtttttttactcctggggccaaagtagggggacaaacacccagtcgtatatggcttcagctctgaccaaaggcggatagggagctctcctgggtaggagcagggagccaagggggaggcagtggctgtgcctgggtgggcacagacagatctggtacatggccctgagccctgggcagagggacaaccttgccggtgagtgggcaggcagagaggaggcggcaggatgctgtttccccgattccatcctcagggagtggagactggaggggaggtgcactgactcagatgaactgttctcccccttctttgataagaagtaggtggcagcagcctctggaaaagtcagggccctggaggttacctggcccagggctactacagccacaggccccagtggcaccatgccaccccttccatggctccactcaagggggccacacagccaccgcctcttcctcctttccttcatcccaaactgggacaaaagacttcaagttctggctaagatgtagcagcagcggatgcccgggcatccaaagtggaaagccagggccccgtgtcaccggtgtgggcaaacacacatgcacgtgcacacatgttctccctgaatcactcagcagcagacaggctgccgccctgggggtctcagccctgctagggctcaccaggtggaagcctaggtggtctgacctcagtttaggagtgggtcatttacgtcatcttaccatttggggacgagacaggaatggtatcccttagggacccagagacactgcaaacagtgggtggccatgtagggctgcatgtccctgggtccaggggaatggagggagcaataacttgaagaaggggggaagggtttcttttatccttttttttttgtgtgacttctatcaaaacacagaaatacagcacacgcacaaaccagcacaaaagcgcagcgctctatttacagctccggctggcacctgcccacctggccagccgcctgcagggaggggtgggagaggggtcagccacatcagcagggaaaggatacgaagcaggtaaagacagaaggaaaatgggcgggtgcggagaaaccaagagggaggtggagctccagcaatgcggacacgaggagacaggagcagaaggggctgggggagacctgacctgtccttcctctctccccccagattcccatccaggactccaaaagcatagctgaagggggtgtggcgggtgcagggatgcacggaaagaggtaaaatagagaggctccataggaattgggaggagtgggggaggggcagtcctggtggccgaaatggaaccaaccccaatgcaaaatcccccaccccacactgccacttccccctaagctgccagcacatctggtttccacaaatgccactccctacacaagccccctcccaccccctccaccccaccccacgacccaggccatcccaacattgaggggaagaactttgttaaggttatcgtatttgcaacattgccccggctccagccctggcagcgacttctagaagggcaggttggccatgccgcctggtgccgggaggtagcccatctggctgtccagggacacactgcgctgccgaagggggtgggacaccatgaggttctgctggggcggggggcccatgagggagccctgcggggagagcatgtggggcggctggctgtagacctcgccccccacgccccgctgcttcatcagcatgaaattctgctgggtcatgaggccttgtggaggggacatgaccccctggtgcaggccatggggcaccatcccctgctgtgggggcacgcctgtcctgcccagcaaggacatctgtccagggtggcacatggacatgttgagcccccgctggacgccctgctggcctgggaggttgggaggccgagagggagtctgctccgccatcatgttctgcaggttcatgagatgcagattagggggctgagccttggggggctggttctcgctcttggggaagtactggagggtgctgcttggcttctcagaggggatgatcctcgacaagtcgaactcggggatccccgttggggtgggccggatcacctcgctcagctcggggtcgttcagcactgatgccaccccagggagcacacccggtgggtatgcgtcgcccatgcgcccagccatggctttgcccatcaggtgctgctggggaggcatggggcctggcggctggttgggcaggtcctcgggaggcagggccatgcctgacgggtagtgctgctgcaggccaggccccccgcccccacccccagtgggggccatggcaccatggggctgctgcagccgaggggggaagggcatcatctgggaggagctgggcactgggccacagggggcattcagggagtcggggccccctggggccatcatcatggagttttgagggggcccccctgtcccctgtgcgttgggatgcagtggaatgttggagcccagaggggtgggggagggcagcatggcgggcgggggctcatgggacaggggctgctggcctggcaggttcatgcccatagggctctgggcagcggctgagttcaggtgcatctggctgggctggctgttgctgatccctgtagggaatagaagacagggggtcaggcacggtgtgcccagctcggggagggtgcagggctcaggccttccccactcccaagccagggggtgccagaggtcaaagtcttcaccactggcttcccctggctgggagggaagggactggaggcattgatgctagaagccaagagaccaagttctggcccagttcgccagacacaccaccaggtgttggaaagaccactcgagtgctctgggctgggtttccctaatgactccagcgagtgggaacagcatcccggagcctccacccccacacccagggccttcagaggcacaaaaaagccagcacaaccacagctgtgctccccgctcccagtgcccacaccagctggcctccctggggccctggcctgtcctcgcacctggcccggagccctgcggtggtggtggggggggcagcaggggccggtcgggcagcagctcgtcgtctgaggtggcgatggtcttgatggcattgtggtagagcggggtggagctgggcatggcgtacttggacatctgggtcatcatcagtgacagggggttctgggaaggtgtggggtctggggaggaagtgaatggtaggctggggttcatgaggccgctgggagggttggcgggaggtgctgaggagctgctccgggggccgctaggcgggagggtacctacagaaacggggagacaaagagagcaggggtgactggggaggggcagatgagtttggctgtggatatggggaggtttaggaagcggtcagttccccaaatcacctggtccttcagacacacccacaggcccccactatctccagagcccaccagtcttcaagcaattcctgcagcctcagggccccaggcaaggggaagatcccaggccccaagtacgatcactcaaaatgcctgggagactcacgtggtaccccctgagaaagcccacaaatgtcatcatctgccccataagcagagccatccacctctgggcccgtggtacacaggcccttactcactcactgcccagccccagcatggacacactgctcagcgcctgcctgcctgcctgcctgcctgcctgcgcaattgactcaccctgttccatgttgctcagggtggtggaagagttcatgttgagaggcggctgcttgttctgggagacccccgggctgggcatggccgtcttaggtgaggcaacccagcctggagaaggcaccgccatggaaggagacttgagcctgctgggcgagccagtgggtgaacggacactgagggaggagccgaggacctggggcgacttgagaggtcctggcgggttggcagaaggcaagggcaccatctgtgagggagtctggggtgacttgaggttggcagagggcgaggtgaccaggggtgagtgcacctggctaagggtgggcgacttcaagtgccccatgcccggtgagcccatctgattaatactgatggtgaggtccgaaggccgcctgcctagcccccggtttggggctgaatgcacggtcccaggaggattggacgcagggggcagaggcatgtggctgagccgggtggtgcccacgttgctcatgggcattgagctctgatcagggctgaacatgtcttgggtattgcccatgtcctgggacatggcttggtagggtccctggcctccagagaatccctgctggccctggttgggaaactgtgaaggcatcagcatcttctgcgggccgcccatcacgccactgctgttctgggcccgaacccgggccatctcctcaggactgaggccctggggccccatcaagtccccagggccccgcatcttctgcgacatcagcatctgctgctgcggggtcatctgcacgttcaggttcatgttcatgttcatgttgacattcatgttcatgttgaggttgcctggccccatgggtgggtccacctccctcagcccagactgccccatgggagggctcaggaggccccggcctccaccaaactccatgcccatgggagtgcccgccaggccctcaccaccagccatctgcccgggaaacatggcaggatccatctgtcggtgcgcctgcatcatccgctccatctccatgctctgtcccatgccactgcctgccatgcccagggggcgctgcatgcccatcgaccgcttctccagcagctggtgccgcagcagctcctcacggacccggggagtcatgaatcgctccgcctcaccctgcccacctgggtagggcatggtgttctgggcaaaattgctgggtccccccatagggggcaagtcttcggtccagcccatgcctggtctcacgggcctctgcatggcattcatgggcacctccatgggcatactctgcatgcccccaaacccaggtacccgttgtatctggttgcctgggaaacggggcccaggaaagggaggtccgccccggagctgcatgggatcttgaacatccatgggcccccgcagctgcgcacccattccaggtggccactgatccccaggcttgctgtggtaaggaggcgggggccccctcaccatcatgccccccatgcccatcatgtcctgcagaggacggctcccatgcagcccaatctgttcctctttccgccgtttctcttcgtagtactcctcctgcagcttgcgccaggccacctgctcaggcgtgaggctgtcctggcccagcctctgtatcatcatgttcatctgctgccccatgtccccacccggggggtgcccaggcacttcatgctccagcggggggccccctaggctctgtgtctgtgaaatcatggactgcaagggttcctcatatttcttcagcccgctgggaggggccgtgggtggctgctgggggggagggggggcttgtgctggtgggcccccctcacccgctcctcctgggggccccttgaggaagggctcagtctctccgctgcggagcagcagtcgctcaatgtctcgcagcgtctggagggaccgttcccgatgctccagctgctctttggacaagccctctgagcccaccaggctgcgctgcccatttccaggggcggctgcctcccccagcagggcagggccgggggcactgctggggtctcctccaggaggcagagggttgttggcggtggtagccgtcggggtgttagggtgggtgcccccagtcccaccacctgtgctggcagctcccaccgagttgggggccaggtcctgactgctgtcctcaggaggcccctctgggggcagagcaggcggggcactgccaggggccgggggtggcggcggcggcagtggaggtggctgggactgcggggtgcctgctgacggcgtgctcaggggtagcggttctggggtggggggcactttaggggcctgcagaaggacaaagagagcatgagacaggtaaggggacgttccacccagtcctgctgctcacagaggcgccacgctcacctggtcaagcttggcccggggcacgttctgctggtggtaggcgaggatggagtcggcccggccctgcagcactgcctctgcagccctgcacagagtgggggcaccgacagctcagagaggtgagcaggagggagccccaccctcacccaccccaccctgcccctgcacggggctccctcggaaccccaggctgagaggtgctgggcagagagagagagagacttggcctgcccaccaggcacttacgtgttggccaggtgggtggtgaagacatatacgaactgcgagggaggctttccggggacgcccccgcccccgcccccgcccccaggggcatcaggccgaaggccaggaggagggccgtgcggggcgcctggcacgctgctctcgctgaggggcagttgggtggtttggccgggacccagctgtggggccgccatggctgggtctgctacattacaatctgcaggagagaggacagggaaaggggctaagtggtctagatacaagaaggaccagctgatgccccctcccactgatgctcacagccttacagctcgtgcccacagggacatttgatgtcagtatctggtgttctcaccaggctggtttccacgatggcaagagtggtgaccatgtggagagcagggacagagaaaatgtgtcctctccacaggctcccatgggcctggcattctgctggggacttaacaggtgtgatttcatctcatcaacacaccctgggaggaacgtgtcacacactccacttaacaaaggaggaaataagttcctcacccacagttacacagccagttagtgcagagccagaactgaacccagggccgggactctgaagctccgctctgagctgctgcccctctcactgggtaagtgtatgtgcacacagtctagtgacccagttagggagaaggcagagagggtacacaagctgatgatccaaatgatggatggtttttcactctagccccaccactaactgactttgtgattttatgaaccagacatccctctaagcctcggtttcttcatctataaaatgtaaaatactaacctcctccttgcacagggggcaggccaaagaaatatattttttaacagtaagtttaaatcaatgtcacagactaaaaaaatccatttgaaaaacagagagccgggagcggtgtctcacgcctgtaatcccagcagtttgggcggtagaggcgggcggatcacctgaggtcatgagttcaagaccagcctggccaacatggtgaaaccccgtctctactaaaaatacaaaaattaactgggcatggtggcgcatggctgtaatcccgctactcaggaggctgagacatgagaattgcttgaacttaggaggtggaagttgcagtgagccgagatcacaccattgcactctagccagggcgacagagcgagactgtctcaaaaaaataaataaataaataaaaataagaaagaaaaaacagttagaaaaagctgacatactggaaacactctcaagacagaccagctgccctcagcaccaagggaagttttgttccatggttagacacttgactgtaagtcttagcgtagaaaaaaatctacaacgggtctaggtgagtgggtagacccattcgcatgccaagaaaagcaagtcacagttcctggcccgcagacagtaagtaccagcattctcagttaatgggagacagattgcctgaagttgtctccatccagccagggcagtgaccaccttcccatgggcccagtgtcaggctgccctctttggaaaaagtttcttctgcaccttcttctctgatggacccaccccaaaacggccctgctctggaccctatctatccaattttacatagaagagcagagccagaaatttgcgggggagcttgagagctgacctcaatgtgtgaaggctgctgagtagctcttggatacgagctatggggagacaggcagggcttagtccaacaaggaactttctagtacaataacaatgataaaagctaacatgttacatgtataacctcatttactcctcataccaaccctatgagataaataatacttttacagatgaggaaactgaggccctttcccaaatttacagaaataacctgggttgcaaacgaaggcagcctgatggcagaactagtcctgtcaatgtctacgttctatcgcccctccagtaagaactcttcaagaatctaagggcaggccgggcacggtggcttatgcctgtaatcctaacactttgggaggccgaggcgggcggatcacttgagggcaggagttcaagaccagcctggccataatggtgaaactccatctctactaaaaatacaaaaattagccaggcgtggtgacgcatgcctgtaatcccagctacttgggaggctgaagcaggagaattacttgaacccaggaggtggaggttgcagtgagccgagattgtgccactgcactccagcctgggcaacagagtgagtgagactctgtctcaaaaaaaaaaaaaaaaaaaaagaatcaggccgggtggctcacgcctgtaatcccagcactttggggggctgaggcaggtgtatcacctgaggtcaggagttcaggaccggtctggccaacatgctaaaactccacctctgctaaaaatacaaaaattagccaggcgtggtggcaggtgcctgtaatcccagctactcgggaggctgaggcaggaaaatcgcttgaactcaggaggcagaggttgcagtaagccgagttcgtgccattgcactccagcctgggcaacaagagtgaaactccgattcaaaaataaataaataaataaataaataaaagaatctaagggtagtacgactaaaatagtcgccttgagtatgggatgttagcaatttctactttgtatttccctatgtttgccaggcacagtggctcactcctgtaattccagcactttgggaggccaaggcatgaggatcgcttgagaccaggagttcaagatcagcctgggcaacatggcaagactgtctctacaaaaattagccaggtgtgatacatgcctgagccccagctacttgggagtctgagatgggaggatcacttgagctcaggagtttgaggttgcagtgagctgtgatcacaccactgcactccagcctgggtgtcagagagagaccctgtctctaaacaataaataaataaaactcacaaagtttctacaatggtgcagtctgatgtgacataagtgaactggaggtggtggctatggggggaggtgtctggtctgggaagcagtaaaggcttctatcatcaaagggttcagccagaggcttggcgaccaccaggttagtcccacgggggagagagaactgatacaggatggtctgtgaggttccagctagctgtagaggtttggtatttgaccctctacacccctgtcacagacatagtctgctcactccataacatttgctgactctctctcctcctctgtaattggcatcatgataacactgacctcacagggctgttgtaaggattaaataaaacagagtagcaaagtagccaatgtactcttttctttcttctttctatggtccctgccttcaaggagttcacaatttaatagtctctggctagtttctttttcttctttctttacttctttcctttctttctctctctctctctttttagagatggggtctccctatgttggccaggctgttcttgaactcctgggctcaagcaattctccggtttcagctccccaaattctggggattacaggtgacagccaccacacccagcctctctggctagtttcttatgtctctctcctcaaaaagatgtaaacgtaaactttgagggaaaaaaaatatgtacaagcttcccaggggcaggggttacatctggctctcccccatcactcatggaaggacaagatataggcgaatccataaaagaatcagaggaggagtgggcatccctccacacccacttcttgtcctggtgacacaccctgggtacttgccaggagtcaattagaggttagggaagggcactagagacacggccaagtggcaactcacacccaggcttagcagggctttgcacagcagagccaactgcccggctcccagtg

SEQ ID NO: 236 - DNA, 3763 bp, Homo sapiens
ccactctaaggaatgcggtccctttgacaggcgaaaaactgaagttggaaaagacaaagtgatttgttcaaaattgaaatttgaaacttgacatttggtcagtgggccctatgtaggaaaaaacctccaagagagctagggttcctctcagagaggaaagacaggtccttaggtcctcaccctcccgtctccttgcccttgcagttctgggaactggacagattggacaactataacgacacctccctggtggaaaatcatctctgccctgccacagaggggcccctcatggcctccttcaaggccgtgttcgtgcccgtggcctacagcctcatcttcctcctgggcgtgatcggcaacgtcctggtgctggtgatcctggagcggcaccggcagacacgcagttccacggagaccttcctgttccacctggccgtggccgacctcctgctggtcttcatcttgccctttgccgtggccgagggctctgtgggctgggtcctggggaccttcctctgcaaaactgtgattgccctgcacaaagtcaacttctactgcagcagcctgctcctggcctgcatcgccgtggaccgctacctggccattgtccacgccgtccatgcctaccgccaccgccgcctcctctccatccacatcacctgtgggaccatctggctggtgggcttcctccttgccttgccagagattctcttcgccaaagtcagccaaggccatcacaacaactccctgccacgttgcaccttctcccaagagaaccaagcagaaacgcatgcctggttcacctcccgattcctctaccatgtggcgggattcctgctgcccatgctggtgatgggctggtgctacgtgggggtagtgcacaggttgcgccaggcccagcggcgccctcagcggcagaaggcagtcagggtggccatcctggtgacaagcatcttcttcctctgctggtcaccctaccacatcgtcatcttcctggacaccctggcgaggctgaaggccgtggacaatacctgcaagctgaatggctctctccccgtggccatcaccatgtgtgagttcctgggcctggcccactgctgcctcaaccccatgctctacactttcgccggcgtgaagttccgcagtgacctgtcgcggctcctgacgaagctgggctgtaccggccctgcctccctgtgccagctcttccctagctggcgcaggagcagtctctctgagtcagagaatgccacctctctcaccacgttctaggtcccagtgtccccttttattgctgcttttccttggggcaggcagtgatgctggatgctccttccaacaggagctgggatcctaagggctcaccgtggctaagagtgtcctaggagtatcctcatttggggtagctagaggaaccaacccccatttctagaacatccctgccagctcttctgccggccctggggctaggctggagcccagggagcggaaagcagctcaaaggcacagtgaaggctgtccttacccatctgcacccccctgggctgagagaacctcacgcacctcccatcctaatcatccaatgctcaagaaacaacttctacttctgcccttgccaacggagagcgcctgcccctcccagaacacactccatcagcttaggggctgctgacctccacagcttcccctctctcctcctgcccacctgtcaaacaaagccagaagctgagcaccaggggatgagtggaggttaaggctgaggaaaggccagctggcagcagagtgtggccttcggacaactcagtccctaaaaacacagacattctgccaggcccccaagcctgcagtcatcttgaccaagcaggaagctcagactggttgagttcaggtagctgcccctggctctgaccgaaacagcgctgggtccaccccatgtcaccggatcctgggtggtctgcaggcagggctgactctaggtgcccttggaggccagccagtgacctgaggaagcgtgaaggccgagaagcaagaaagaaacccgacagagggaagaaaagagctttcttcccgaaccccaaggagggagatggatcaatcaaacccggcggtcccctccgccaggcgagatggggtggggtggagaactcctagggtggctgggtccaggggatgggaggttgtgggcattgatggggaaggaggctggcttgtcccctcctcactcccttcccataagctatagacccgaggaaactcagagtcggaacggagaaaggtggactggaaggggcccgtgggagtcatctcaaccatcccctccgtggcatcaccttaggcagggaagtgtaagaaacacactgaggcagggaagtccccaggccccaggaagccgtgccctgcccccgtgaggatgtcactcagatggaaccgcaggaagctgctccgtgcttgtttgctcacctggggtgtgggaggcccgtccggcagttctgggtgctccctaccacctccccagcctttgatcaggtggggagtcagggacccctgcccttgtcccactcaagccaagcagccaagctccttgggaggccccactggggaaataacagctgtggctcacgtgagagtgtcttcacggcaggacaacgaggaagccctaagacgtcccttttttctctgagtatctcctcgcaagctgggtaatcgatgggggagtctgaagcagatgcaaagaggcaagaggctggattttgaattttctttttaataaaaaggcacctataaaacaggtcaatacagtacaggcagcacagagacccccggaacaagcctaaaaattgtttcaaaataaaaaccaagaagatgtcttcacatattgtatttatatatttatatttatatatatatttatataatggtacaaaatggctgggggtgtggccatggatggagggaagagtaggctggcctgtggcgtgggtgggaggagaggggacggagagggcactcggcccgctgcaatctgacccctctctcctcagggcaggaaacacagagtcagacagtttgggggggtcttgggccaggggtggagggctcaagggcacagggcccaggctgaggcagggcgggcaaagcgcctggcaggatgaagggcaagtggccccccaaacacagaggccctggccatggaccctgggaggtgaccggggtgagtcaggggcctgttgtcagccccagaggaagcgctggacctggccgatggtgggccgagaggacagcaccaggctgggagaagtggggcgagttccctttgtattacagctgccagtgcaagaccaggccctccaggccaggaaggctagggacgggtcctggtagaagacaccctgtctagaatggcccttggtcctggaggtggggcgcaaaaggcctcagccagggaactgccctgccacctcccgaggcaggaaaggaagtgagaaaaggagaagtttttttactcctggggccaaagtagggggacaaacacccagtcgtatatggcttcagctctgaccaaaggcggatagggagctctcctgggtaggagcagggagccaagggggaggcagtggctgtgcctgggtgggcacagacagatctggtacatggccctgagccctgggcagagggacaaccttgccggtgagtgggcaggcagagaggaggcggcaggatgctgtttccccgattccatcctcagggagtggagactggaggg

SEQ ID NO: 237 - protein, 325 aa, Homo sapiens
MASFKAVFVPVAYSLIFLLGVIGNVLVLVIRHRQTRSSTETFLFHLAVADLLLVFILPFAVAEGSVGWVLGTFLCKTVIALHKVNFYCSSLLLACIAVDRYLAIVHAVHAYRHRRLLSIHITCGTIWLVGFLLALPEILFAKVSQGHHNNSLPRCTFSQENQAETHAWFTSRFLYHVAGFLLPMLVMGWCYVGVVHRLRQAQRRPQRQKAVRVAILVTSIFFLCWSPYHIVIFLDTLARLKAVDNTCKLNGSLPVAITMCEFLGLAHCCLNPMLYTFAGVKFRSDLSRLLTKLGCTGPASLCQLFPSWRRSSLSESENATSLTTF

SEQ ID NO: 238 - DNA, 3694 bp, Homo sapiens
gctgccacctctctagaggcacctggcggggagcctctcaacataagacagtgaccagtctggtgactcacagccggcacagccatgaactacccgctaacgctggaaatggacctcgagaacctggaggacctgttctgggaactggacagattggacaactataacgacacctccctggtggaaaatcatctctgccctgccacagaggggcccctcatggcctccttcaaggccgtgttcgtgcccgtggcctacagcctcatcttcctcctgggcgtgatcggcaacgtcctggtgctggtgatcctggagcggcaccggcagacacgcagttccacggagaccttcctgttccacctggccgtggccgacctcctgctggtcttcatcttgccctttgccgtggccgagggctctgtgggctgggtcctggggaccttcctctgcaaaactgtgattgccctgcacaaagtcaacttctactgcagcagcctgctcctggcctgcatcgccgtggaccgctacctggccattgtccacgccgtccatgcctaccgccaccgccgcctcctctccatccacatcacctgtgggaccatctggctggtgggcttcctccttgccttgccagagattctcttcgccaaagtcagccaaggccatcacaacaactccctgccacgttgcaccttctcccaagagaaccaagcagaaacgcatgcctggttcacctcccgattcctctaccatgtggcgggattcctgctgcccatgctggtgatgggctggtgctacgtgggggtagtgcacaggttgcgccaggcccagcggcgccctcagcggcagaaggcagtcagggtggccatcctggtgacaagcatcttcttcctctgctggtcaccctaccacatcgtcatcttcctggacaccctggcgaggctgaaggccgtggacaatacctgcaagctgaatggctctctccccgtggccatcaccatgtgtgagttcctgggcctggcccactgctgcctcaaccccatgctctacactttcgccggcgtgaagttccgcagtgacctgtcgcggctcctgacgaagctgggctgtaccggccctgcctccctgtgccagctcttccctagctggcgcaggagcagtctctctgagtcagagaatgccacctctctcaccacgttctaggtcccagtgtccccttttattgctgcttttccttggggcaggcagtgatgctggatgctccttccaacaggagctgggatcctaagggctcaccgtggctaagagtgtcctaggagtatcctcatttggggtagctagaggaaccaacccccatttctagaacatccctgccagctcttctgccggccctggggctaggctggagcccagggagcggaaagcagctcaaaggcacagtgaaggctgtccttacccatctgcacccccctgggctgagagaacctcacgcacctcccatcctaatcatccaatgctcaagaaacaacttctacttctgcccttgccaacggagagcgcctgcccctcccagaacacactccatcagcttaggggctgctgacctccacagcttcccctctctcctcctgcccacctgtcaaacaaagccagaagctgagcaccaggggatgagtggaggttaaggctgaggaaaggccagctggcagcagagtgtggccttcggacaactcagtccctaaaaacacagacattctgccaggcccccaagcctgcagtcatcttgaccaagcaggaagctcagactggttgagttcaggtagctgcccctggctctgaccgaaacagcgctgggtccaccccatgtcaccggatcctgggtggtctgcaggcagggctgactctaggtgcccttggaggccagccagtgacctgaggaagcgtgaaggccgagaagcaagaaagaaacccgacagagggaagaaaagagctttcttcccgaaccccaaggagggagatggatcaatcaaacccggcggtcccctccgccaggcgagatggggtggggtggagaactcctagggtggctgggtccaggggatgggaggttgtgggcattgatggggaaggaggctggcttgtcccctcctcactcccttcccataagctatagacccgaggaaactcagagtcggaacggagaaaggtggactggaaggggcccgtgggagtcatctcaaccatcccctccgtggcatcaccttaggcagggaagtgtaagaaacacactgaggcagggaagtccccaggccccaggaagccgtgccctgcccccgtgaggatgtcactcagatggaaccgcaggaagctgctccgtgcttgtttgctcacctggggtgtgggaggcccgtccggcagttctgggtgctccctaccacctccccagcctttgatcaggtggggagtcagggacccctgcccttgtcccactcaagccaagcagccaagctccttgggaggccccactggggaaataacagctgtggctcacgtgagagtgtcttcacggcaggacaacgaggaagccctaagacgtcccttttttctctgagtatctcctcgcaagctgggtaatcgatgggggagtctgaagcagatgcaaagaggcaagaggctggattttgaattttctttttaataaaaaggcacctataaaacaggtcaatacagtacaggcagcacagagacccccggaacaagcctaaaaattgtttcaaaataaaaaccaagaagatgtcttcacatattgtatttatatatttatatttatatatatatttatataatggtacaaaatggctgggggtgtggccatggatggagggaagagtaggctggcctgtggcgtgggtgggaggagaggggacggagagggcactcggcccgctgcaatctgacccctctctcctcagggcaggaaacacagagtcagacagtttgggggggtcttgggccaggggtggagggctcaagggcacagggcccaggctgaggcagggcgggcaaagcgcctggcaggatgaagggcaagtggccccccaaacacagaggccctggccatggaccctgggaggtgaccggggtgagtcaggggcctgttgtcagccccagaggaagcgctggacctggccgatggtgggccgagaggacagcaccaggctgggagaagtggggcgagttccctttgtattacagctgccagtgcaagaccaggccctccaggccaggaaggctagggacgggtcctggtagaagacaccctgtctagaatggcccttggtcctggaggtggggcgcaaaaggcctcagccagggaactgccctgccacctcccgaggcaggaaaggaagtgagaaaaggagaagtttttttactcctggggccaaagtagggggacaaacacccagtcgtatatggcttcagctctgaccaaaggcggatagggagctctcctgggtaggagcagggagccaagggggaggcagtggctgtgcctgggtgggcacagacagatctggtacatggccctgagccctgggcagagggacaaccttgccggtgagtgggcaggcagagaggaggcggcaggatgctgtttccccgattccatcctcagggagtggagactggaggg

SEQ ID NO: 239 - protein, 370 aa, Homo sapiens
MNYPLTLEMDLENLEDLFWELDRLDNYNDTSLVENHLCPATEGPLMASFKAVFVPVAYSLIFLLGVIGNVLVLVIRHRQTRSSTETFLFHLAVADLLLVFILPFAVAEGSVGWVLGTFLCKTVIALHKVNFYCSSLLLACIAVDRYLAIVHAVHAYRHRRLLSIHITCGTIWLVGFLLALPEILFAKVSQGHHNNSLPRCTFSQENQAETHAWFTSRFLYHVAGFLLPMLVMGWCYVGVVHRLRQAQRRPQRQKAVRVAILVTSIFFLCWSPYHIVIFLDTLARLKAVDNTCKLNGSLPVAITMCEFLGLAHCCLNPMLYTFAGVKFRSDLSRLLTKLGCTGPASLCQLFPSWRRSSLSESENATSLTTF

SEQ ID NO: 240 - DNA, 44529 bp, Mus musculus
  misc_feature (1)...(44529): n = A,T,C or G
agtcaccacaaagtgaggaaatgctttaaatggtcagagcattaggaagggtgagaaccagtgccttagagtcacatttagcagaatgaaagaaaaaaaaaaaaaaaaaagacggttgcttagagttacattgtggacacacggcttaaccactctgagctcttgtttccttacccatgaaatggggataatgatgcttccatctcctgggttggagtgaggattaagtgagaataaatcttagctacagcttttataactcagagtgataagcctacctgctaagtggccaaagtctatccacttagatcttttaggtaattgctctaagaaaattttcacaatatcgtttcatgtaattcttgataaaacctcttaagttgttcttgcaaaagtttttagtaccgcgtactcagtgggattagatgatcagtgtagcctttccttagctttcctttctgggtttcgcataattttctgtgtaaggcattgattctgtgtgtttggataatatacactacttttgtaacttcatcattgtctatcattttaaataaattcttctttaaaatactagtagctggcataatcctataaagctgaaagacaggatcacttgttttatgattttcctacaaccatcctgggagcattcaaacctctgtaagaaggagctgtggggagaattaggaatataaatgagtagtaagtatctagctagaatccagatcaaagacactttatgctgcttggcttgctctgtgtgccagtagctagccacaagtctttttttttttttcttaataacttgcagcttgacagctgtaactcttggaagctttcaatgctacttttgcagttaatacctatatatgttcaaacttcaggagtgttcaataaggagaaactaatgctaatttccaaagaagagtgtggaggaacctactctgtgtagcaaagtgggttcatctaaatagaccacaggtacatttgatgatctgctctgattgatccaacaagcatttattcagcctttataagcaacgtgaaatgaagattaaatatatttctatcttaagggtggaggagattcatactctgtgaaatatgagcaacacattgagtgaaatattttcatctctgttttatataaaaggaattgaggttgtagctctctcagagcaggcaatccctaattctgtgaggcttcaaatcctgtgcttttagttaacagaatcccaagctcagtgtctttccttttctgtagccaaattggctaagcacgtcttaaatatgtgtccagtggaggaaacatcccattttccaaaatgtaagggatgcacagagggtgcgggagaaaggggaggagaggctgagtggctagatgtgactctggctttggctataagacaaatgatttatgaaggaagcagctctccgagatgcctactggtttaaagcacatcaccggggtagaggagcagccaggaatctggtgctgaggtcctagctagcgagaaggcatattttgcacggtttcttagtgtctggtgtttaagaatacagtcagggtaaagacttcgctgatcagactccaagacagggatgtccacaattgcagacatattggctggaagagtgggagttgtagggagtttcatgccttttacaccttcattccaataacttctgagcatttactgagtgctagacttagggatgtagctgtgaagaacagatgtgactctatcctcatccttgcatggtgctggagaggcattagacaaatagcaccatgcaccaatctgtgggtactttgtctttgtggtatcatatgattctgtaaatagtgtggtagaggttatagnnnnnnnnnnnnnnnnnnnnnnnnnnnnnnnnnnnnnnnnnnnnnnnnnnnnnnnnnnnnnnnnnnnnnnnnnnnnnnnnnnnnnnnnnnnnnnnnnnnnnnnnnnnnnnnnnnnnnnnnnnnnnnnnnnnnnnnnnnnnnnnnnnnnnnnnnnnnnnnnnnnnnnnnnnnnnnnnnnnnnnnnnnnnnnnnnnnnncacacacacacacacacacacacacacacaccacacatattctggcaaaggctgtgcttggaatttgaatacattagttgattgactaaggtagtttatttcattattatgtatatgttcctaattttcaagaatatgtagacttaaggtatctggaattattttagtaagatacttatgcattttaatgaagtcatcaggtgttatcaggaccattctcccctaccccaatgactggagttactatgtgtcatatgggtcagctgaatgatgctataaattatgactatttttttcatcctaaagaaatcttcaatatcagagaaagtgtgtgtgtgaaaggaaagagatcaggagtcataggtgcaagagtcacctacagaatacaagagctacaagagagaatctcaggtgtagaagataccatagaaaacattgacacaacagtcaaagaaaatgcaaaatgcaaaaagctcctatcctaaaacatccaggaaattcaggacacaatgagaagatcaaaactaagggtaataagtatagaagagagtgaagatttccaacttaaagggccagtaaatatcttcaacaaaattatagaagaaaacttccctaacctaaagaaagagatgcccacaaacatacaagaagcctacagaactacaaatagattgaaccagaaaagaaattcctcccatcacataatagtcaaaacaccaaatgacaaaacaaagaaagaatattaaaagcagtaaggaaaaactatcaagtaacatataaagacagacctatcaaaattacaccagacttctcaccagagactaagaaagctagaagatcctgggaagatgttgtatagaccctaagagaacacaaatgccagcccaggctactatatccagcaaaactctcaattaccatagatggggaaaacaaagtataccatgatagaacgaaattcacacaatatcgttccatgaatccatcccttcaaaggataatagatggaaaactccaacacaaggagggaaactacaccctagaaaaagcaagaaagtaatcatctttcaacaaacccaaaagaagatagctacacaaacataattccacctctaataacaaaaataacaggaaacaacaatcactattccttaatatctcttaacatcaatggactcaattctccaataaaaaaaaaaacataaactaacagactgtatatataaacaggacccaacattttctgcagaaaggaaatgcacctcattgacaaagacagacactacctcagagtaaaaagctagaaaacaattttccaagcaaatggtcccaagaaacaagttggagtagccgttctaatattgaataaaatcaactttcaaccaaaagttatccaaaaaaataaagaagtacccttaatactcatcaaaggaaaaatctaccaagaagacctcccaattctgaacatttatgctccaaatgcaacggtacccacattcataaaagaaactttactaaaactcaaatcacacattgcacatcacacaataacagtgggagactttaacaccccactctcatcaatggacagatcatggaaacagaaactaaacagagacacaatgaaactaacagaagttatggaccaaatggatcagatatctatagaacatttcatcctcaaacaaaagaatataccttctactcagcaccttatgataccttctccaaaattgaccatataatcagtcacaaaacagcctcaacagatacaagaaaattgaaataatcccatgcatcctatcagatcaccacagactaaggctggtcttcaataacaacaaaatcatcagaaagcccacatatacatggaagctgtaaaatgctctactcaatgataacttggttatgcaatgaataaaaaggaattaaagaatttttagaacaacctagatgtccctcaacaaagaaatggatacagaaaaggtggtacatttacacaatggaatactacccagctattaaaaacaatgacatcacaaaatctgcagtcaaatggatggatctagaaaatatcatcctgagtgaggtaactcagtcacaaaagaatgcaaatggtatgtactcactgataagtggatattaggcaaagagtgtggaatacccaagatacaactcatggaccacatgaagatcaagaggaaggaagaccagagtgaatgcttcagtcctacttagaagtgggaacaatataatcaagggaagtagagggtaaaagggacttgggaggaagagaggagagggaggggaaaatgaggggtagaatcagatatgggaggagatggaggagatgtacagagggtcaggaaattgaaaagaggtgtgtagcaatgggggatggggaactgggggtagcaaccagaaagtcccatatccaggaaagcaaaagcctcccaggaccccacagggatgacatcagctgaaataccctacaaaaggaagggagaacctgtcgagaccatatctagaggttaggcatggctccctggttgagggatggggccactcctccatctccaaaattttaacccagaattgctcctgtctaaaggaaatacagggacaaagagtggaatagagactaaaggaaaggccatcctgagactgcctcaccttgggatccatcccacatgcagacaccaaacccagacaccattgcagatgcaagaagtgcttgctaacagtagcctgatacagctgtctcctgagaggctctgccagatcttgaccaatacagatgcttgtagccaaccattggactgagcacagggaccccaatggaagagttaagggaaggactgaaggagctgaaggagtcttatttggcatcaatgggagaggaggtccttgggcctgtgaaggcttgatgccccagtgtagaggaatggtaggacagtgaggtgggagtgggcgggcgggttggaaagcaccctcacagaagcaaggcaagggagatcaaagaggggagttacagaggggaaactgagaaaggggataacatttgacatataaacaaataaaatatctaattgaaaaaaagaaaaaattatatttaaaaaagaataagttgtaatttgtttataataaatgtagtattccagtttaataaaatctttaaaggactgaaaatattaaaaaaaagaatatgtttgcaaaatatgtgtctgataaagggttgaaatctagaatgtataaagaactccaaaatccaatggatatattgtaagtaagtcaagtaaaaataagtttttagctttgatagacatttctcaaacaatgccgtcacaaaaggacaatgaatacaggaaaaaatttcaacatcattaatatcataaagacacaaatcaaagccatagtgagaacagaatttgctgaaaagaagagtggtaaatgttggtgagaatgtgggggaaagaggccaccaaatgatctggctatcctgataatgggagagtacatccaagggaagtttaatcagaaatagaggagctatgtccactccaaagtacaccacaccactattcacaacagatgagacatgggagtaacctaaaagcctgttcattcatgaatgaacaggagcatttggtctgaataggctctgcaatgaaaaggaaggagatgctgttgtgtggcagaaatggaggtcattatgttaagaggagtaagtcaaggggctggagggatgactaaaaagtggttaggagtgcttgctgctttgggttcaactccttgcacccacttgggctccaaggctctgacatcctcttctcaattccttgggcacttgcactcacatgtacacatacacataatttaaaatataagtttattgttttatactttccctttttatttattcttctcttatatattatattgcaattcagttttccctccttcccctcctctcagtctctctcctagagtgagaattttggtttcttaaaaaatacagaaatattataaggatatgtattcattttaattccaggcctaggatatatgggctgcttcagactgtccacagcagctgactatgatttgccttgtgctctagcaggggcatgattttgctagctgaagatagtttctgtgagtgtgtgatgtttagaactctggggacttttcagaaggtccttgctagggacccaagaggtaagattgttgttgttgatggtgggttgttggttgtgtgtgtgttttaagtacttatgtgcaaagaatgaagaaggagaagaagaaagagaagaggaggaggaggtaggggaggaggaggaggaggaggagaaggagaaggagaagaagaagaagaagaagaagaagaagaagaagaagaagaagaagaagagaagaaaagaagaagaagaaaaagaaaagaagaagaaaagaagaaaagaagaagaagaagaagaaaagaagaaaagaagaaaagaagaaggaggaggaggaggaggaggaggaggaggaggaggaagaataattagatatcttgactgcaaatatcaaacttgccccaaggaactcaatgcccctaatcagcagaaagtagtctaatgataatgtcagcccctttcacctctatccttttttctctcctatctagtgttaatgagttgaaagagtaggaaaggcatgaagggtaaaaaccttctccatgaagaaaaaaaaaaaacccataaagtagtcaaatgtccagctacactccctcaccacctcccttttctcctggatctccccctacctccacccctcagaaaagagcaggccttccagggacatcaaccaaatatgctgtaacaagctacaatttacatgccgtcacattaaggctggacagggaacaacaacaacaacaaaaagcaggaacaaaaaggttccaaaagcaagcaaaagagtcagaagtatccctggatcccactgtttgtaatcccataagaacatcaagctacataaccataacagatatgctgaggacctaggtcacccatacaggatccctgatctctgtgagtccacttgagtcccagtcagttgctaatgtgggctgtgttcttgtgcccctgacccctgtggttcctccaatccttcttacccctcttcctctgcagaactccctgagctcctgctaatgtttggctgtgggactctgtatcctctcccatcagttattggatgaagtctctctggtctcttcgatgatgattatgctaggctccagtgccagcatgtcacgcaggcatgacatggtaggttggaggttagatggttgggttgatgtcccagtctttccacttgaggccctgcctcgttgcagaggatggctgcagcttctgtgtctcccattactaagagtcttcactagggtcacccttgtagatcccatggagtttccatttcactaggtttctaactcattccccaaatgcccctccccgatcctagtcgtctctcccagtattttctcattccatccgccctccaccatccaacccctcctgttttcatcctcacctaggaaatatattctacttccactttccaggaatattctgtgttgttccttctttccattaagcattccttgttacttatggtctgtggattgtagcatgattatcttttactttacagttaatatccacttataactgagtacataccatgcaacatggttttttagcatttaaacattctttctggttgtgggttacctcacacaggatgatttttttctagttcctctcatttgccttcaaatttcgtgatgtcatctttttaacagatgagtatggtagattggagtgtcctttagttatatatgttcaggagtggtaaggctgagtcttgaggtagatagattcccacttttctgagaaactgctatattgatttccaaagtggttatacatgtttgcactcccaccagcaatgaaagagtgtttcccttgttaagcatcctggcctgcatgagctgtcacttgtggttttgatcttagccattctgactggcatagcacagaatctcaaaagttgttttgatttgcatttcctggatggctaaggacactgaccatttctaagtgtttctcacccatttgaaattcctctgttgagaattctctgcttagacctgtatcccattttaaagttaaattatttagtttgctgatgtctagtttcttgagttctttaaatattttggatgttagccctctgtcagatgtgaattttgtgaaaatctttttctattctgtatactgccattgagagagaagtcagctacacaaagacaagtatcacataatttcatccaattgaagataaaaaaacaaacaaacaaaccaaaacaaaacaaaaaaacattcattgcctagaatcagagagtagaatcgggtattatggtccacatctataatactagcatttaagaggttgtgtcaagaggattacaagtttgaggccagcctgatctacagagcgagttccaggacagccaggactacacaaagaaaccctgtctcgaaaaataaaatatgtatatatgcctataaaacatcatatggtatttgactgatacgtttaatatttaagttttatataccagctaaaatgtaataaaaatatttatatcatatatggatgccttagaaattaacaattgataacatatctattgaaaactataaacaaaacaacatggaaagtaatggctcaaatattaagtatttttataattcggtaagaatataggtaaaccttgactttatgcttatatttttttctaaatttttttacgtatgcaatatagctcacttttgtattcagaataaaaaatataaatcattcttttaaatatacacaaaatcacaaatgaggctggtttcacaaagctcagattatcagaaaagaaagaaaaaaaatcaccaagaaagttttgagaaagctaatgtgtatgagatacatataaccacaaactccgatgattatagcttctataagagtcagactatcagggaagctgttgagtacagatgctgaccagggggatccaggatggctctagaagaggaatgtggagctggccatgctggtgggctagccctgtctacagaaggcccaggagttggggagaggtgtggagagctggttacaaaggccccgggtgtctctgtggtgaatcttccaatggtctgctgtttgaaatgtttctttgagggacatagggaacatgaggtagcaagggtgtttcgtttacctcctgtttccctaagaaaatatggtgtttttatgacttcctctttgctctggaaatttctgcagctgctcagatgcctgggtgcttgccaagtgtgtacttggaagcggttttcaaaattggtagaagtgagttatacatacactccataggatcgccttaagattatttcaaacttcaatctcataacgtttatgcagaatttaaacacgtgcatagaaatctctcagcttcccacacagccttgtattttggattcgtctgtaagagtttgtcttctgagagaggtttttctctcttctttagaatgccttgtttgtctgcttttgttgttgctgggccctaagcgcccacatttcacagctccgatgctcatcagcatgactctcctgagcacattatctggtggtggctgacactctcttcagtaccccccccccccgcctcccaaaaaagaaaaaagaaaaaaaggactggttgctaaaagaagtaaaagtcaagtcatcaaaaacaatgtaatatcctgtgtgaaagtcacgaagccttgtggtttgagtcccttgatcatgtgccctgtaaagtggccctggatggcagagagtcatagaccttggcagatgtgacttcagttcacaccacactctgccttgctcacagaggaggggctgcagccctggccctcatcagaacaatgacactcaggctgctgttcttggctctcaacttcttctcagttcaagtaacaggtaagcaattttgataccatttttccccctgttttcatttgtgttctcatgaccagcatggtttattttaaaactgtagtgacctgtgaaacttgaatgcatttagagttttgtgctaatttgacaagctactatttagaaactagctaattctcataatacagcaaatagaactttaacacaagttctttgggaagaagtaacattttatttaacaactagtcccaagaacttttatattcagaattttatttattgttttgttttgagatagggtttctctgtatagccctggctgtcctggaactcactttgtagaccaggctgtcctcgaattcagagatttaactgcctctgcctcctgagtacaaggattaaaggcatgtgacaccaccgcccagtcaggattctactttttacatcctataaaactgtgataagtaagagagtaggtaaattctagaggtcttggattagattgcctgggctcatatctcaattctccctagtggcgtttggagcaggatttactacctaaatctctgtaaaacgggaccctaaatgagcatcacctcaatttcattgtgagataaaatgaaatagacattgtggaggtcttagttcaggcttgagcagtaaacatggtgttcatgtaagtagtatgtctacctgaattcagcgagtgccaagaagaatcctgaagtaagcacaaaagctggtatagacaccagtaagtttccttttactgttggttgaaatatgtttatttaggttaaaatccttcaagttcccaatagcaatggcaaggaggctatatatttatcaattagaaagttcttaccctaaacaacctttggttctcatgagtaagagctatttattgtcataaactccattccaaatgaagagaccattggaaggaggccatctattgaagagaatgttcaataatttctccagaggatgcaggtctccagtatttggcaacacatatttacagctaaagaatctttaaaatttatgtttaaaggtttctgtatatcatgtttaagggatcttaactttcttttaaaggaatacttaagacaccttaatttactagatagtaaagccttacccttgttgaaagtcatgcaacattagtgattttacacagaatgcttttctgatgccctctgtggacagccatttgttataaactcatgtattttctttggaaactttttgggttggactcaaagctttgtatgtttcactgtttagaatctttacaggggttagctaaaagagaagttggcaagttcacatgtgtgcaggtcgttagttttatttaccttaagataggttttgcttcatagataccaatacattttcctactacgtcttaggatttgatgccaagcagccattgaaaaagtaggatggggtagaggtaggaagctgaagagaaagaagttaaaaggaaaggaagataattgcaaatgcaaagatgtgtgacccatggaaaaggatgtgaagccttttgtatgcttttcatttctctcttcatgtccaccatctcacacaaggaaactccctggtcaaatgttactgtcttgggctggggatgtagtacagttggcatagcacttatctatcgtacatgaaaccctgggtttgatcacagcacagcataaaacaggcatggtagcacattcctataatccagtagaggcaggagaatcagaatgatcaaagttatccttggctacataacaagtatgaggctaacctgggctacatgagacatgtaactgcattaaaatgtgcctgtgtgttaggggcaggtctttagattcattaattgaataattttgactcattggttcacagcatgcattaatgcacttacttgatgatgcttaagtgcaacctgattctcatggcttgagtgatacagcagaaagatcattatggctcaattaaagaagtctgatacaggaagggttaggaagctgtaccttagatgcttcttctgctaaagttacatgttttgtatgcatgttggataatagtgctcctgagatcttaaaagaccggattctgttgggttttggagtgtaagtccagctcatagctgcaggttcctgagagaataatcatttgtggttgatagtgggggtgggtagataacatgcatcattggttatctatctatctatctatctatctatctatctatctatctatctatctatctatctatctatctatcctagccttttgttagtttttcagcaaactgaccatgtagtctagagactaaactcaggaaatacctgtttacttttccgtgagagcacttcttttcatttctccccaaatcgtagtggatagagcatgcccaagtggccaggttgaacatgaatgacttctccactgattctgcattcccctcagaactccttttccatagtgaggcatggaaaaatgattggcatttaataaaaagtcatatctacaaagtagagtaattaaaaactgtattcttgcccgatctttggcaaatgacttcctctgtggtagatgcacagaaaaataattggcttctcacagttaagtgtcgctctgaggctgggcttgcaaagtaagataagaaaagatgagtgcggaggaatgtgatgtaatctgcaggctgctgcctttgcactgattctgatgcatcgtggccagctcttctgattgttaaaaactgaccaggcattctggcatttgaagtacatctgatagctacttccaaaatacaggatttgctaagaatttggttcactaccatgctcttaattaatacactatctttttagtgtcccctcccccaactaccctcttttaaaggcaacccatctagcagagactttaatagcaaggagttttaaaattaatattgatttatcaattccaagaagcagaatgagtcatcgccacaggcagatcagaagaaacgaatctgtgagagttgctgtgaagagcaggcatgcaaacttttgcggtgggggaagggctctcattgcctcccttccttagatatggactcttctatctaatgacccccttttctattttcacgagtgaagaaattccctgtaattaccatgactgttgtgtgtcgatatcttccttcaagtacttcttagttggcagtgtgctgaccttgaccaagtgaaaaaaattatgccactaagattccagaagcaaatttcatttgtggtttatcatctaaagcattgttctttttgttcaccttcacaggcattggtggggacaacagggttcacttgtcgtgactagaagacaaggaactcccagaaagcaccattacctcatagcaggcgggttgacagggataaatccttttctcctctcctctcagctaaattatagtttgcttttttccttaagaaatttattcacagatgtttgaatttttctgttgagagtttagtcaaactcgaagagaaatgacctgggtgtttttgtgactcactggaggggtgtccagctctctaagtcaggtgaggctttctttggactctctgggtagtgatgtggttatagctcgaccaccacccacccacacacccaatcaactagttaaccaaccaaggaagaggaccaaaacaacaaatgctcaacatacccagagcttttatcaggagacttggtgagtggcaattagtccctgaagctgggggagcaggctggggtggggagcattaaggcctgaggggtgaggggaaagcattcacaaggtaggttttcttgtttctttttttgcttgtgactctcagtttgacagccttaagctgtagaagagaggtttgctgggtgggatcaagaagtcctcagtttcttggcagagactcagaaagggagtgttttctctgcctttagtgatttattgctaatgtaactggtcccatgtttttttttcccctttgtatcattatgcaaattgtatcttcatgagtaagagacacttcatgtcggtggagagctttttgcttaacttcgagcttctttatcttcacatcatggttaccatcatctcctcgccgccaccattatcattatctctaggatgttggttgacaaggtaaccaggttaccgatgtcattcagaattacttatagttcacattagtctctaatctaatcttgaaatcctttccacagcttctgaattacgttgttggctcataattgaccatataatgtataatcaaaacatttaagtatcttcatcatccatctgttcatctagacatctgatttattgacatgcccctcattgtaacaatgatactggtcgagaaattaggcgggtgtttgaattttcaacctttcacctttgtgttttgttgtgtgtttgtgtatttacaggtgcatgtgtgcatgagtgtggaagcagagggcagcctcaggttccatttctgtggtgctgaccaccatttcttatttgtttgtttttggtttttgaattctctctgtttcgagatcttgcctagtaggcttcgttggcagcccactaaatactagggatgtgcttatctctgcctccctggtactgggattacaagtggatgccatcacagctagtttttaaaatatgacttctggtcattgaactcagttcctcctgcttgcacagcaaatactttaccaactgacctatctctccagagtcaacatttcgattttttaatcagtgatcaattagaaggttgtggttttcttgctgaggaggaagagccagaacatcacttagatgtatttgcagcttgtttgggacctggtaaccgtctttgatattgagtgatactaatacataattggagatcagcaggggtctagctgaaacacattggttctatcctcagggtttaagtgtggaagggcacataggaggagaatgttttcttctgttgcgacacttcagggacccccaaaccagagtgctattaagtgtctggcttgaccatgtactttggcaagataagttctcattcatgcactccttcgggaggcatttattgagaatcttctatgtgcaggatagtctggttcctgtgacaggttaaaaaaagaaaaaacacttcaagatgtgataaagtaaaggggagaatcgtaaaaccttaggttttttttttttcagtcttaggtcaattatgaatagcattctatccacactaatttaatgtggtagaaaacaatgataaaccacaggtgtttagagatgggaggaaacccgtatttctcaatttgcagggaagaaagctgtgctgacaatcatactagaagatgttgagaaaaagattacattgtcaagtttcttgggattgttgcatgcttttgggctgctctcatcttagtttttccaagctaatgtcttctgtaccctaataaaaaggcccttaactccaacatcctccactgtctcacactggcaccccacccttcttgactttactaaggctgtatttgtcttgtggttccttctgtctatctctgccattcctgatctactgtttttcatagtagttttttgggtgaaagttttttcacactagtttttttttgggtgaacgagtcacctccttgaggaaaaggctgcctttattttaagagatggttctatgagaacgtagctccctttagcaaatatttattagacctctcatatcttaatccttcatggcactgaggaaacagaggaaaaggacaagaagcacaaggtcacaacacacaggatctgcttgtatcattagttgagttttcttgttttcatggactgagctttgtaatgggatacaacctatgaaatctggttaggaggcaactgaagtgagcactggagtcagagaacagacttcagagggaggttgggaagtcttctcaaaagatgtgaaaattagagagaggacaaatctctaagtgcacagtgtgtgtgggcttgacctcagctcctggctgagataacagggccacaaggttcaaaccaactagaagctaccagtttccaggcagggatgttaatcttagcatctctttgtggggttaggttgatttgtttgttttgttttgtttttggaataagtatgtagctgcttgatcttgggaagaccaagactggtttttgttcttttgttttgttttgttttgtttttaaactttctaactcactcccaactcaaaatataaatctaaggatttctcaagatagggagatgtggttagggtctttagtttgtcacatcatgacatacatgatctgggtatcaatttactcatctggtacatgaagggattggattcaagaatgtattttatacatacatatacacatacatacatacacacatacacacatacatacatacatacatacatacaaacatatatacatgcatacatacacacacatatatatacatacatacatatatacatagatgcatatatgtagagaattgcaagccagttatctctgaaatcttttatatctgttgtttagaatcttaggtgcctatgtgcttctaaatggctgcagggttggggaagccatactgcctttgttgactcttattttccaccgtaaagttcaggtctaaaacagtcattatttccagaattccaggctctgacacctacccagaagagtctgtgcatgtcacaggagccctgagcagcttgttcaaatgtttcatatttacagagagcagcacagataagataaatgttttgctatcttcttacatgttttgaataggaattcagatgatgaagactcaggagccctaagatctggtcattggattaaaaagcacatatagagaacaatatatcagggtagccagattgaaggagtcactgtaacttaatttatttgtgtaatcttatttgtgagtttatacaatgaagtgattaaaaatattatgctcatgtaaataattcttttataactgttttccatatttgaaaattgaattacggtcataatattcgtgttgaaagttaataaagataactgctctttcggtactagaataatgcagtttgactcttttgaatggctcagtggtatttactatgataccacttctgtttaatcaatttgctctgccatggtgtcctatttctagaaaaccggaggacagttgtcgtcctatacatggtagacgggactgatctcaggcttatgaggttgtgtgtttaagagtttcagctccacagtggaatctctgggaggtggggctggattacacaggagtaggcaatggctttctagacgtcttaaaattaccattcaccctcaacacaggtgacctaaggatatttcagtctccagcggcttcctaaaactctgccctatccttttgtctcctcctgattgtctctgtgggaggccttatccaccccttaagtctaacatttctgaaacaatccatcagttccttttctccaaacagatatcatttattaacttacattatcaacggtgcctcaattcttgcgcttagcggcactggaacttgggtgggtttccactcatgcgcactgactgtcagtcagtccagcgctggtgctttgctccacccatgcgcactgactgtcagtcagtccagcgctggtgctttgctcatccttttgcagctcaggccttgccagctcacatctgttatggcaacagcctcactgctctgaattgtccttaaccttccatcatactatcgtgcaacctctccccgcagggagtcgggagaggtgggactccattcttaccttagatgtgaagagtcctggaaaaatccacgcgccttttcttggtatcaaagccccctgcaccccgcatgattggtgtaaacataatacctatttcgtccttaaataaataaaattccttgttactttctgataaacccttgcagtaaggtcatttccttaatcttgtcctatctcaatttgctgtagacttcatggtccagctcaggactgctctgtatataagcctccagactcattgcttctgtgagcttttccttggaactgtcaatgactctatagaattcatgcactgtccatgggtttggagtataactgtgaacctaccagggctttcttttatatctttccatttccaaagaaccaaataatcagagctcattatttaaacttgctgaattaatgactttgtcatggaagaatttagaatatcagagaacaattttctgactaatcaaattttgttttcagagtgtatacattaattattctgacaaattttctctcctagaaatgaatgttttatgtctcagtactcatatggtttttttgtttgtttgtttggttggttggttggtttttgcaccggaactttctgacagttgcatataggacagtaatattttaaagagacaaagacaagtgtcttctacattattgtacatgtgtatcatattgttcagtgtcatttttgggaggagagattttatttctgccatgatttcatataaaaatgagaatttcacaaaagcagttaatggaaaatgagagaaaatgaccataggtttttttttcttgaaaatttaccttgcatttaaatttttaatatgattttcacctgtgtcatctgtctgtgggcatccaaagcactgtaggtcatagaacagagttaagggtatagctttgataagtaatggtccaaagtgattcatttagtaaatttattcatcatatttctatttctgttttcattggcacctataatcaatttgtaattgcctgagttgaatgatatttgttttgttttaaaatattatgtactattaataagatttagtgtacttgatacagttgatagcaatgacatacagtcttggacaaggttagccggttagcttttttttttttttaaatcaacaatagtcatgctttgtcacagtggtctctactactcttctgtttccttctgactctggcaactcctgtcttcagatctaacagtggtcacagctgtggtgctgcatgccacaggtgtcccctgctcctgttggcttctactctctcacaatttgaacagtgcatctttcataaacaagcctgcctatgggtgccagtgacttaacaggccacgtattttcagttggaatcccgaaagagacaacatacatgcttgtatatcatattgttgaaattcatttaaaaaaaagattttacttataccatgctttcttttaaaaatgagaagaattgcaagaaaacagttgatggaaaatgagaggaaataaccatagttactttgaaactatttacctgagctacaagatgttgagcccccagtatgacttacaggctcaagaacaagcactagattggctcatcagagagcctgtaccttacagagtctgaaaggaagctagtggtcagggggctagaaggtgaaggatatcctagtcccaaacaggaaatacgtttggaggaaaattatagtaacttaatcagatctgtggtcaggacccaggcattctttgccagggcaaccaatgacgtcttcataactggctacaaacacgagagtacaaagcagccaaacatagcctcgccccctatctaacatgttactaacacatcaaattctgttcacttggaattttcaaaagaaaacaccagaattaggaagctataacttcatttttcccccaaatgtatagaagtgttgtgatggaaataaatggaatccattagaatctctagaagaaaaatcaatttctaattaagtatgtataatatctttctaatatcatctttagcatgccagtctatgcttcagtcttgagtcacaccagccttggtgggccactttatttcactatgatgcttatgatataaaaaaagaaagacagaatattataaatttaaacatgatttaaaatgtaaatctttttagttaaggattcagccattaaaagttggactgaaaggtaactttatgagctgattgacatatttttgtacatggagctaaaatgaaatggaagagctacaatggataagcactaattgtaaagtagaaattctttatgaaaagcagtttgtataataatagtgtttgtaggtctcatctgagattcatctatgaatctgtaggtctctcaaattgtgcgcaaactctttgtgtgtagttatccctcgttatccatggagaacatgttccaagactctctgtagacacttgaaatcctagatagtaaaactctgtaaatgaatgtctttcccatctttgccaagcccaccacacactgtgtctgcaacttctgcagtcagaggtgtaacagcaaactagcctgactttccctccttagtgtgaatcctaaatacctcagcatttgatctttttttttccttattaattatagaaatttttgccagaatcaccgttcgttcactgcaggtcattattaagtaaaataaaggtagtttgaacaaaaccagtgagatatctcagtggttgatctgatagctcagggaacaatttcatggctaactggtgattgtgcatagtagaacaaccaactaaagggataattcacatctcaggtgactaacattgaacctcatcacaagagtgatgccaattcaaaatttatgaattgtttatatctgaaatttcccatttaatgatctgggtttacagatgaatataggtaatagagactgtggaatggaaaatcacagacaaggaagagctagttggaaccatacttcctctaaatatgagcacaaaactgatgttgtcttgtcgaatgaacaaagttgttctttttttcttctgttcatttatgattgaaagtatcagtcacgaataaattacacattagctctttagtattttgtgtgactttgtttgaaaaaaaaagtcatttatttttgttttcagtagcctcatctataaaacaagggaatggctttagataattttcaagttccttccagctgagatctctctctctctctctctctctctctctctctctctctctctctctctctctccatacagaactccactaaaatggtggagaaaatgaagtttactttggtccagtcctcttgccattcaacttaccgactgctaaatagtaattcccttgattctcacatgaagatctcagtatcagctctttgatcaagtccagactctagaggacctaaaaccaaccactggaattatgttagaatgttgatgcagtgtgtcagagggaaaggaacaatagaccaaaatctgttgggaggcttgagttcaagtctcaaaggctgctcatttgtcttgaacttggactcgtcttataggctcatgattctaaactactatgttccctacattgtattttatacttcatattctttgtaaatacacaatttagcttaactgggaggtgtgtgtttgtgtgtgtgtgtgtgtgtgtgtgtgtgtgtgtgtgtgtgtatacatccttttaaggtcaaagttctttgatgtttgatcaccttagagatgattttccagtgcacctgtacagaggttggtttggttcctaagcatagtaattgacccacttagaattgatgagaaggaaagaagttgtttttgtaactattgcattcccttggaaacacaatcaattgtcaaccttctagaagccagttctaccacaagtttcacagactattggtgggaactctggctctcacagccttgccctgggctgcagataagtgctttctcacctctgcccttagtcttcatgtcacctggtatagagcctatttgtgaggaaaagagtcttgaggttactgcttcctgtctccacagctttggcttgtttagctgctaggagaggctttgaaaagcaaagcacaaattcaccatcaaaacaacctgatgattggtagacatgccagccaaggcagtcttttactgtgttgagtgaatgcagttgggagagtaacgctgtttcttgtgggtgtagcctaggtaaaccactcacaagaaggaaaacagaatcaaatatttgcagagggaaagaaagatagttcctagcatggtttagaaaacaacacatcttcaaacagaagtccatagaggaaagctaaatgtatctctagttccttccaagtcggtgcttctcaacctcactaatgtggtgaccctttagtacatttcctcatgttgtggtgaccccagccatcaaattattttgttgctatatcataactgtaattttgctactcttatgaatcacaatgtaaatatctgtgatgcaggatatgtgatattttaccctcaaggtggtcataactcacaggttgagaaccactggtctaagtctaggtatgtccttaaattttataatattcccttaaattatttgaaataccacagatccccagaaactccaaaaaacaaaccaaaatacatagccaagctgaccattgtcatgtgcttcagttcatctgtatctttgtgctgtactgctgtagggtggagatggatctcttcacgcatgctccatttttaagggaaattaaaaggagctagtagtatcatacgtattagaaaccacagtgagtacacatggtcaataccatttaggacaactgtaatctttctttcatacctaaagaaacctattttatttcgtgtgtctccagagaagatgtcgattctgaggtcctgtcaggtagcttctcacggggaataaattaaggtgggactgaaatctagaaattgtattaacatttaaaaagaggtcttatcagctcaaatcctaagctaggaagctgttagccacatatcagcacaatacaagaaattaccttgactatagcatctctctttaagcatcagctaatctaaaaattatctgtcgacacagaagagagaaatgtgagcaccgacggataaactgcccatctccttttcacagttttcaaactcttcccagcaaaagctggcacagtcactgaatgaggcatttcccctttccttggtctgtgcttgatctccagcacaatggcagccaacacacagccttgacacaggggctgtgcagttctcattgagagcatgcttggtttgtaacgctgaggtcaaatgggcttgggagaaatcagacaacctcagtcatgctgaggcttgagctcagaggcctcgtgctgggaagaagaagaaaagctacctttgagttctcatattactccttgtgaagaaagaccgtttcagagaatgactgcagtctcttcctctgaaagtttccatcctgtgtcccgacccctgatgctgaaaacatgtcttcgttatacccagatgtccacacttgacttagtttttggatctgtctattctggtaatgaagtagaaatgagtaaaaagaaaaataccttcttgtttcttaccctgtttggctgaggaagtcattttaaatgcttccttttctctttaaccacacctaaatcactgtcaagttgggtaagcattagcctgtaaacattgctcacttcatccactacttctaagccagtgtagtctctcacctctcacctctgatgaatcttgcccactctccatgccctcatccttgtaccttccataatactgcttccactttggttagcgtgatctacagaaatgaaaagctgtgagcacctgcttttcggcttaagagccttcacttggtctctatcactggcaggagatcttggtaaacatttgtcaatcaatgtaggcatcatcctttatcccacagactagcagtcttcatgtctaggaaatcaactggtcccacaacctgcagactgttgtctactggatcaaaactatatatatatatatttttttttttttttcttccttactagactgggaactgcccaaggaattcatgtgtaggaaatctgttttccttctcacatgtgtcttgggaagatgtcatctgctgaatcagacagggattactaaaagaacattggagtttggatgttggagcttgtcctatccctctagctcctccctacccctacacagatgttcacagtagcattgctcataacaggcaaaaaaatgttgagtgtaaaaacaaaatgtactacagctgcacaacagaatagtcataaactggagttctgatactttatcacatcacacacgaaacttgaaaatagctatgtgaaagacgccagatacaaaacgacacacatactgtgatttcaaacataggatatgtcctgaatgggcaagtagagacaagaagtagaggagtggttgccaggggctggagggagagcatgacgggaactgatggctcctgcgatggacgtttccttttcgtgtaatgaaaatgttttacagaaatggtggtccactcacaactcccattgtattaaaaaaaatcccttaatcgtgtttttaacaagaagaactttatgatacgtgaattacatttcagtaaagttatttcaacccaaatatcaacactaaccacatcttaacttatatcaaatatatcagaatttctgagagtaagaggttgtggatatgcgttttctttttaagttctatatgtattgaaatactgataattatatagatgataaaagttagtagagatttaattctgtgtactcaccttctacccaaagcaaaaaagaagaaatacaggaaggaagaaaggaaaaacaaactcaaacaaacaaacaaacaaacaaacagaaaccaaaaccaaaacacctgtgtacatggattcaatcccaggttaaatgataaatttcatttttaacaacttcggagtctaactggctcttgggtgtggtacaaataaccttttaaaaattagaactagcaggctgaagagattgctcgacaattagaggacagcctcacaacaagaactataaataggtagctcttagcatgcttccccagtaaaaattgattttaattttatttatttatttttaaaaatttcttcacagacagcaatttgtttactactgaaaaattcaggtcatgtctgagaaagaggatgcctacatcctatccgtctttgatctatgatgttgactctctgtgcctaagcggtcagctatttaggtggtgtagcctttggtttcagttctgattttgttcaccatttgctcaatgtctgtagatgaaccattcatgtttctagacctcattcagtcatctttttctttttaaacaaatgtacagggacggtgtcccacacttttaatcccaacactcaggaggcaaaggcaggtgaattagtgagttataggccagcctggtctatgtagtagacagccagtgaatacctgtttctgtttctgttttgttttgtttgtttagaaaaaaaaaagagagtcaaagacatggtaggcacctgttaccaagcctgacctgtgggtggagggaaagaaccaatcctacaacttgacctctgacctccatttgcatgcatgttctctctctctctctctctctctctctctctctctctctctctcacacacacacatttaaaatgtaatactttcttttaaaaaaggagtgtacttctgtatttctgtgttctggaaatgggggtgcattggaaacagtacgagctttgtctcccttctcccaaaggaactgagagtatagttttattttctttgcctttaaggggagaaattgaattagatggtatccagagctttgattgttgcataaagatagaactcttcttgctttgagagaataatcatgcaacgtttttgggaggctcttatctgaatttgctctggaagagtaatttaagccagcccttggggctacaaacgtggtgcctttctttacccctttattgactgctcttggtttggtcaataagcaaagtcagaatgttttaaaactttgaaatacttttacaaaaatctgttgcagagttgaaaaaaaaatcacttggacatctgtgtcaggctttcaagaggcctccaagctgatcagttattcaggaagtcaacccaaggcctgactaacatcataggaatctcaactggactaacaaaattctagtgactagctggggtgctcaatgctcacagcagctcacatttagctggggtactcagtgctcacagcagctcacattgtgctgtccaggtggaagcacgctcctgtcttcccattcagagaaagatgccagcatcattgaaatataaacttgagaactttcagtgtagtcatcattccaagaagagctattaatatatctttttctgccaagggactaactttgttggaggtctgttcagttggctaattaattcactttgatttcagggcaatggaattattattcttatgctcctaactaaatgtttttttcccttcagaaaacaagattttggtaaagcagtcgcccctgcttgtggtagatagcaacgaggtcagcctcagctgcaggtattcctacaaccttctcgcaaaggaattccgggcatccctgtacaagggcgtgaacagcgacgtggaagtctgtgtcgggaatgggaattttacctatcagccccagtttcgctcgaatgccgagttcaactgcgacggggatttcgacaacgaaacagtgacgttccgtctctggaatctgcacgtcaatcacacagatatttacttctgcaaaattgagttcatgtaccctccgccttacctagacaacgagaggagcaatggaactattattcacataaaaggtaacacgccactgtactcctgtaacctaaaggacggttgcagaatgctgaaggcagggttgggataagtgaagctggggctctcgcatgtgatctgagactcgaaggcaaatctcataaacctgtttctttttactccagcaatgattccagcttatttggaatgcctctatctttcctcactgaaggatgagggaagagtctatggaaatagaaactatgagattttcctgaattcatttgaccttttggatcaagtatgaaattgagcagagtcctctacaatgaaacatagtctgacagatcaggactcaggaagaatgggttggatactaaactaattttttttttgatccatgttcttccacttactaagtttctttccattttccaaaacataaaaaggatgctggtctagaaatttagggggcatgcaatttgagatcttggctaagttatccaactttttaatagccccaaacccaatataattaagcagcactcatgaatcagcagcaataagtacattatgtttacgttgagattatgttctgtgtaaatactgggaagaaaaataataggattctcaaactcaaatatagttattggcattaacattaaaaactgagggagggtggatagatttttatgtatatgagaatgacagataagaaaatatatactccattttacattcaactttagcacaattacaataaatgcattttcttttatgccataacaaaggtgtacttaagaaaatttaaatatcaaacaagaaaagaattattatgttaacatgacagtatctttcatgtcctggcaaaaacagaggcaattaatacacaaattaagatttctaatatcagtaattctcaggcaaaatatttaattggattgagtcagaggataaaaagatatactattttggaagagtaaaacacttttccatataaatgatacattactttaggctagtatattgtgtgtatgcatacatatcgatttaggagaactagaaaagaagtcagggattctgtacttggcagctttcagccctgtttatatttgtatatcataaaccctaagtaggtaactggaaaaatgcctgtgctcaactttaagtttctgacttaaccaacatggcttgaggaaggggaggtagataatgatttcatactctgccggataattctaatgtgtagccaggattaaaacctcatggatcagagagttgttgatattctttttatttttgtattttattacaactttattagaaagaacttggaaataaaaaaaaaaaaaaaactcatgtatccaaattcatcagactcaaagtctatacatctcaatgaactgtgaagtattctgcttagttataatcttccacgagttttaatagaactgcatggagttttttccccatcccctttctcataccaaataaataacctgactcattcagtatcggataatctgttggggttggagccagatatttatcttttcaaaattttccaggctagagttctgactgccatattaagctgatgatttttcttaggggttgaaaacatttgtatcattttacttatttcaaagagtttagggtataggtaaattatctatatacctgacgagggctgggggtcaggttaaagtcactgaaagtcgccattagcactatgcagtgctaacaagacccagtgactgacacccatgtagcactacaaagcagtgtttgtaaccttagccttgtatactgacaaagtatgatcagtggtggggttgagtaagtcccaaagagcaagactcgatcatctaagctggtggtattttgcatgttttagtactttcaaattcgcctctgatgtacaggacagaaatgtactcaactgctgtttctgtgtcctttaacccacatgttgtgtttttcagagaaacatctttgtcatactcagtcatctcctaagctgttttgggcactggtcgtggttgctggagtcctgttttgttatggcttgctagtgacagtggctctttgtgttatctgggtaagaggagcaacattgcttttatgtaacttctctgcgcctgccctctgactatattaagactctggcctgtatcttttctacgttaaagcaaatgacgcttttcagtctgtccaacttatacatagtaatgatctgatgtgagttctgtttcccagaaggcaccaagtagccaggcagaattagaatgaaatgggaagattacggtgggaaattagagaattagcttttcttattcttaattttctaacataataattgcatatcaagcagcttaaatgcatacataaggtataaaatctaaatctcatcaggattaggcaactgaagcccgtgctttggcttggggtcaaaaatcaggagaaagtaggctgctgaaattgtgcattcaaaccagaagaaagcaggtctgtttatgtcagtcctattttctgtctcttctgaagcagttgccctgtgtgaggtcaacttggatgctgtcattatgagactgtaagaggagagggactgttcagagctctccccactgaatagagattactagtctctatagatttttctgcaataagtttaatagatattttcttcctcaatgttgaatttttgattcaagattaaacattttgtgttcgtttgattttttttttttttttctgagacaatgactcaccatgtggaccagattcgtctggaagctactatgcaatccaaactgacctcgactcatgtcaatcctcctgcttcatcctcttgagggcttataggtgtatagcaccatgtctgacttttgaacatatttaaagatttttgaattttaatttgtgtgagtaagtgttttgcctgcatgcatgtctgtgcaccatttatatgtctggcactcattgaaagccagaagagggcatcagtttttctgaaactggagttacagatatttgtgagctaccatgtaggtgctgggaattgaaccccgttccctggaagagaggccagtgctgttaactgctaagctatcttccttatgcttgttgaacacattttgatgaacacattcactgttaagatggtacgaccttaacaaggatccttttcttagaaacccctttgtgtaggagtaacagaatgccttatgtattgattccaaatgcctctgatttttttttccccagaagttgggtgaatatacaggtaagttcttcaatgagaaatgtatgctgcacaagacaaaaaagaccccttatcttgctactcttcacccatctactacgaagcacacttaggacttagtgaatgcttattgtgctgctaaataggtaaccaccatacaaagcaaataaggacctaactaagcctgtttgagatatgatacccatttaaaggcataatccaaatatttaaagagacaacttatgatcagggatttctagaactcatgccatgtgatgccatcttatttactatagcattggagaggggacagggcagctctagctctaagtcatcaagttgtatcttcccaccagagatttaaattgtttatttgcttagccaaagttgcctctctattctattattccccacacattcctgtagttcacaggccatggggcaggtggacatttgtcaggctaccttttgacgagtctataacttttacacagtggggaacagtgctagcttgttcatgggaattgtttcatcttgagaattccaaaagttgtcaatctgggtatggtgacagaggctttagtatagaaactattgcccaacttctggctctgatattagttgagaacgtccatcgctctggactttggagtctgcactcttgctatcttcttgctctacaggggcctccaatgactttagaatccttaggtttgacttggtttttctaatcctcaactactgactttcttcctttccaagtctctaaccaagaacttgaatttcctaatctaaagaccaggtgcaatagccctctgggtacccttccaagaaggggctcccttgtcatgtattgacctaggtcaaaggaatttactagcttcgtgggaaggacttctggaaactgctttggctttcagtgatcccacaggcaccactttaacacttatggtaaatatatatcaaggaaatcagcttctaagatgaggcaccaatgcactgagtgactgaaatcaccccaaaagcagcttctcactttcaatgagttaaaacaattcacctttcaagtcatgcatcagatatgttttgtgctttcctttggcagccccccaatttctggtaagattcatcttctctgccttgggaaaactgttcttgacttatctcacaggctcactgtgactagacagccttagtgctctacttgtgtggattttgggagtcaaaccaggctatctaacaaaaatgccacttatttggacttcaaacccaggtctttgtactctctgaccaagtgggggtataagaataatttgcacctcacagaacaatgtagcgcctttaccatgagctcttcctttcctgctatttggtcaggaaacatcttggtgagctgggcatttagggatcccgaggacttaaccactttctgggatcctatttttgtctggccagcaatgtgccctaggtgaaagttaactgggttccagagccttctgagaatccatgctgtgcaactgtaggaagctccaggctgtgtgggtttctgtctctgtgcttgacctgatgttggcatttgagtaaagaaaaggcatttcttggtcaggttgccacagactgcgacctgtttttttttttttttttttttttttctaattctctgttcattcagctgagctgtcacactggctccctttctaggttagaggagcgttgttttggtttgtttgtttttgtttttgttttaacatgctttatgccagtatgtaccacaatgtgtaggtaatgcgtatttaggtagcattatctgcctttaaatctgcattcttgaccattttagtacattgcttatgtgtgccctgtgtgtggctgctttgtctaggaaacaaggcagaggtaggaggaaaggcaaaggatagagtggccttgaagtcatgcatctttaacgggcattggttggtgagggacacagatacacagacacaaggggtgggtgttctatgcatatacattgtgagagtgcacatgaacaccataggttttggactggatccccagccatttccatcccattggttaagaatcagctaaacccactgtctgataatagtgttggggtaagcatgggagctgattgtaacagattttctttatctttgtgtgtagcttggagaacctcaaagtcacaacacccttcttactgaggcctttctttaagctatggtttcactggaggatccacaggcaagggttggcaaaggagaccctaaaagctagcatcagtactgaaaactgcttgcctggatagtattcccagcagtctttgcttactttgaggccttggcatgtgggtgtgaaaaggaggccaaggctgtcctcaaccactcattatcaatccaggaacacctgtccctcatacctattgtatatacttatcacatctgacttgtctgcttagaataaggctttgtgtttaaataacagagaatcccgactctgcaatccacatgactttctgcttttgacaactatgcaaacattaccatcacattgatctagcaatgatgccctagaccacagtcataaaaaacatggtcaagatgcaaagtgagtttacctctagttccaggcttagtatcattcctctttctctgctcctggtagaatttggtggtttttttttgttgttgttgtttatttgtttgtcttgttgttgtttaattacagaaaaatagcttacttaatgaatgattaaagtgggagtgtttaatctatccaaagactaaaggctttctattgcatttacatatcaatagtgaatatgttctaaaatacattcttgggcttcggattagatgacaacattgagaataatggttgcatttttataaaacaatttcctttagatttttagtagagctgttgatagtcaggctttgattagtcattatcctagtccaaggcacacaaaaaggctcctcagggtcatttaacagctgatgatctgagtaattatccctaaagtcttagaacccctccaataatacctcctctaagtccttccatattgacctttttcttttttcatttccccccctagacaaatagtagaaggaacagactccttcaaagtgactacatgaacatgactccccggaggcctgggctcactcgaaagccttaccagccctacgcccctgccagagactttgcagcgtaccgcccctgacagggacccctatccagaagcccgccggctggtacccgtctacctgctcatcatcactgctctggataggaaaggacagcctcatcttcagccggccactttggacctctactgggccaccaatgccaactattttagagtgtctagatctaacatcatgatcatcttgagactctggaatgaatgacagaagcttctatggcaggataaagtctgtgtggcttgacccaaactcaagcttaatacatttattgacttgattggggaagttagagtagagcaatcaaaaagatcattcattcagccttgggaagtcaatttgcaggctcctggatgagccctgccccgttttcacttgccagcacatttcagtcatgtggtgtgatagccaaagatgttttggacagagaagaaaggatagaaaaaccttctctttggctaagttggtgtttggggtggggataggttagagtatagtacttaactatttgaaaaataatgaaaacacttttttcactcatgaaatgagccacttagctcctaaatagtgttttcctgttagtttagaaagttgtggacatatttttttaatgatttctgaccatttttaatcacattgactcatggaatggcctcaaagcaccccccagtgcttctttcctcattcccggtcatgggaactcagtattattaatagtcacaacatgatttcagaactagatagccctcccacaccaagaagaatgtgagaggaagtaaggtcactttatgtaaaaaaaaaaaaaaacaaacgcgtacacatatgtatgtatacatacatacctatgtgcacacacacacacatatacatacacacaaaatgctatgaagagttatctgtttagtagcctgttatagtcaaatcattttaagtttcaacttcttacagttgggccacttgttgtcctttgtggatggatatctgaaattgtgtctatatattgctagtcatgatactgtgaacaaaaagggtagtgttagtatttgtcagggtggtaaggatgcattccaggaagcttcctctgaggaagggaatgaggtcattcttgccatgtatgaaagacatagatgttttccagaaggcaccattgggagccccagtataagttcctttagactctacagtttagagggattttatatgtcctaggactcaggactccagaactttgtgggctcagctgcttcataccatggggatacattgacatgaacaattattttggaatgtgtctttagggacgacatcaaagttctcaagtacctacaagacctgatactggaatgaaggtggactttcttttttgcttccagttcggatcaactggaatgtatctggggaccttgaagaacggctgtccagctgtcttcaccatttgtatagtgctttgaattattcagaggttttaaagtcaggaagacctggtttaaaaaacatttcattatgagttaaatggcctcaggcaagtcactgttcatccaagtctatgactcctcaactgtaagatggccacactgaaacttgctaagatcctctggcctctgcctcccaagagttgggatttcaggagtgcacaatcatgacccaaactcgtgataatctctcagcttcaataactttccagctaattggaatatcctgtaatcaaacatgaggcatttcccctccccccactgtttttgtgtataaagagatctttaaactttttttttaatatgaggggtaagaaaagataggaatcttttaattctagacagaagatattgtgctttggttttttttttttttaatggcttctattctgtgcttttaattaaaccagagaaggccaagattagccctacttgtgtgataaaagaatgctggcccttgtgattgcagtcagcctcttgacacatagagttcttgaatctaagttataaaattatatttgaaaatgacagagctggagaatttatagaaagggtcatagcaaataacaaaccatttttttttaaacggaaagatttggtctttggcaatcaataactttgttttctaactggaaaaggaggtttactggagatgaatcacacctgaaagttttcatacctcctctgaacacaaccgaaacataggtgtccaaagcctttcgctctcggtatgaaccaacaggcgggttaaaaacactgggtcagagtaaagcttttgcagtttcagatgtagtgtgtatgaagaaaactatgtcacttgctgctattattgtaagagtctaagaactaaaggtgtgcctgtaatttctaattatgagctcacctatttggtaccgagcatgccaattttaaagagacccggtgtaccttatagctacatccaatgataaaattaccacactagcacatgcctgtgtttaaactcgtgctttaatgtttttcttagggcaggtatgcaccccctttgcagtgagttgggagagattttgaaaaagtgtatgacaaacatttttaacacctttggtttcctctctctgtgtctctttgtctctgtctctctctttctctcctgtgcatatgtctcccctccctcacttctctgtctcttcctctctccctctctctgtctttctctgtgtgtctctctgtctctgtgtatctctctgtctgtctctttctctgcagattttcaaaacgttgtttttctatggaagaaatacaagctgtggttggtttgctacgagtcagtagcagtttatcagtaggccaatgttttatctcttggagatttcagtctgggtttacccaatgtattctctgtaatgtgactgctggggacagatataacttgattgagccttcaaatcatttaggtcttcaatcatttagtcaacggagtgagccactaatctgcaatggctattttaatatgcatactgatggtcaaatggatgtctgatctctcatcccagctttctgtactaccatatgggaactatatgtaacttgtatacttacctgaatatgttaaattcaactacatggtaagatggaccagaaattgcaatgttcatgtccatatagccaccattaacccaagttaagcacagtagtgtgggttctctcaggacttgtgaatgagtttatgctctctacaaagacaggtgaagcttaaatctctcttgcactgctatgtttatgcaaatatcaagattgtttctgtaccagggacttaacacattctattcatactattttccctgtctacaatgttatttcatagatatctacttggtttgctcttacttccttgacatatttgcccaaatgccaccttcaactgtagttaattacctgtacaacctgtctccatgccttgttttattttctctataactctactaataggtatttttcttatttattggtttattgcctgttttttttcctaaatctacaccggatctccaaagggaaagaactccatttgctttgattttattgctgtatccccagtgcctagaataatgcttagcctgcaataaatatttattcattgactagatggatttcacgtgggtttatgagttagtggcaaatctgaatgatctgctcatagtctgagaaggaagcagaatcacttctgttttccacttcctattagagacagaagaggtaaagcagacacagagaaatctggtagaaggacatatcattgatacaaattcatttacagcttagaaattttcatgcatcctgaaagatgaatacagtcggagtcattctaaaaatgttattctaaaaacaaccaattaggaataggttgattttccatttaaagttctcaagttctctctcaatagcttcttgacatcctttttgtttttattttttattttttggaaccttcttttaaaatgttgttattggggctgaagagatatcccagtcatttagagcatgacatgggctatttttccagaggtcccaggtttgtttcccagcacccatatttgatgctctcttttgatttctatggccaccagatgcttatgtggtccaacagacattcatttaggcaaaacacacacataaaaaataaataaaaataacattgttgacaatttcatgcatttgttcgctgtatctgacaatacccatacccagctcctggccaccatggccctgggcagtccccaatgcacaaccccctcttgttttcacgtcctcccctttcttttccttttcttttcattttggtaacccacctagtccagttagtgccacttgctggaatgtgtaccagtcatggtggcttgaccttgaacaggtcttgtacaggtagccatggctcctgtaagttcatagtacaatggctgtgcagtggctgtggcatatctagaagacagcatgtcacagcatgccacactctctggctctgacattctataagttagttccctcttccatgacgtcccccgaactttgtgggaaaggttgcttgctacagattcccatttagggttgaagaaaacacaaaagtcactcattctcaccaatctgaccagtttctgcctagtgcagaaaagaggcttatttggcaaaggctgagagcagcacttacctatggatataaaaagaaatatttagaaggaagtcttacctgtctattcagtaaaacaatagcagtgggttccctattatgacctatgacttatgaaccatgagccacggacttttgaccaggttcacagtatcaggcatcaattccttcctatagtgtaggactcaaatctaatcagaaagtgactggttaacccataaccttcctgtcaccattgcatctgtgggcacatcttctctgtcaggttgatattgtagcctccagggaccggttcttggtggcattgtttataaccccaccccacccctcagttgccagaaaagcacctctcggcactatgaaagttaaccagcaggaaagaaattctcaggccatttctaccttgactactctgttctgttctgtaattaaagtctgttgtatcttcagcagcagggctttaccatgcagttaaggtgggcaaccaggacaatagcagcttctgctgccttgcgggcctccgcagtctctatgacatatcccatgcctggcactgagagttttttcatttaaaacccatgtttctgagggaagcattttgtcaatgctttaaacccatctttagcttctggtttctgaaaatatggcttttgtagttaaaaactcaccctacagctgaattactgctcttctctgtggagtgattttgttccagtgaagtctagaaatgctttgttagctctgatccaaaaagatctcaaacaatggtcaggacaggaaatgccagtctctttacctgtcttgctcatggcgtaagtgggtgcttgaaaagcttgcaacagcttcagccaaaaagaagagcaaacaagcaaaatacgtggcattgggagcaagctgaaaatttataccatactagtatttaacacacacatcagcggacagtggctgggggtggggtggggtggggggcagtgcaaaagaatcctgtgtgtggaggaggagacacttgagccacagacacaagagcttgtctgatacttggtaatccatgtagctgtttctatttggccttaagttttcctttgcagatgacctggagtaaacaaggtacatgatgaactcatttttaaacccactctttgttttgttgaaacgagacttgtggagttcaataaatgcagagaaagcttgaaaaagatgagctcacatccaggctactacttaagaaagtctggaatcagctagtctcgtggatgtttcaacagggaaatcagatcaaactggaaaggtaccagattaatagatggaaaaacctctgcacagatctcagtaaggatgtgtttattgtactaatggaaaattgtataacctgttaaaaagttgaggtacctccagactcatcctcaaggtataacacaaggcaaattctatgacatcactagacaggcccctctatcatgtcttaaccccacaaatgtgagaatttacaatcaacaaacaacagcctttagtgcactttgtaggagattcagtccagggctccatctaggcaaacaactgagctgcatccccagcccagggtagtttccttttcagtgggaagagccatgtgtgtatatatctttgtgtatgtgtgtgtgtgcatgtgtgtgtgtgcataagcacatgtgtatgcatgtacatgctgatgttggatattttctctatcattctgcactgtactttttgagacagactttctcactgaatgtaggactcatgccagtgagctgcagtaagctcctgcctccaccttcccagctctagtacgtcaggtgagccccttaaagcctgactctttacgtgactgcttggaatggatccaaacttagatctttatgcgacaggtcccttactgactgagccacctccctagacccacattcctatttaagcagtatcttttgtcatctctcgttatatctggaacagagatgatagatagttgagacaaatcaaagaaactcctgggttcattgcaacagaaatctgacccccacagtaaaaggcagctacagatggtctgggaaccaccttagaaacctgctgatggtgtgctctgtgttctcctcaactgagcctccattgatgtgctggcagtggtactcaggatcttgggttttgagaaatacatctgagagattggacctccttatgttttcccatctgacattctgaaagtagggtgtgtgtgtggtttttgtttttgtttttgttttttttttgaatcataggtttatggttcttaaaactgtagactactgtccagagcagtatgtgaaacactagcttaagtgccttttgctcatttcagggttgacattggacccaatgcttgaaactacttgcattgaaagtctgtgtgtccaagaatatgtcagactttctgagctgacctcactcttggggcaaaatcaaggatcagaatgtgtgcttcccaaaggccatgccctatgccatttgcccacttaaactctgcgaaaggattggaaaggctacaaactcaaggggataaaaagttgtaaaggatagcctggatttcactcatacttcattatgtaaaggcatctcaatgacagataatctcctttgtctccaaagggcaagctgtgaactgggtggaaatgtcagttgagacagaagagcagcaaacagctctgttttcctatagttgtggttttgcatggtgacgatgacacatgaagatgagaacaggtagcatgaactccagtcattatctgagtgaacatctctgccaacgctgaaggatatgtgtgggtgtcacctgcaagcacagagatggggagggagggagggagggagagagggaggaagggagggagggaggnnnnnnnnnnnnnnnnnnnnnnnnnnnnnnnnnnnnnnnnnnnnnnnnnnnnnnnnnnggagggagggagggggagggaagaagagagagagatgaacaaaaggtttatttatgaagtttacatttgatttcctttcccttgataacttcctcatctgagtttagtgtctagactaaattgatgtacatttggtgactgaggaagagggtcagaaaggtgggtttgaattagcatcagcaaagttagccagattcatacagactttttttttcaatttcttatgcacacactgagcattcgatacgttggcatccaaagtgagggtttttgctaacgtctgggaaccagtgatatagatgatatgaagcaagactagctggaggttgtcatggggatgctttttcattccaaacagggtgcaactcatgtttcatttgctttgtgcctctctgtcctgtcttcttcttcattcatccaacaacattttgatgaccgtcttcccagctctgaaaagcggactgggtacaggagaaacgatagagcaacgctgttgtccttatctctgcgtggaccaatcagagtgtattttacaacccttcacctccttctattcaccttaaggcacctacttagtcctgactgtagaacttagacattgtgtatctactgttactctggtgactgtatagtttcttgtagctactgcagtctgtcactgtagacaaacaactgagattagctgtatttcagcaagcttttacttatggatattggtatttgattctcctttaattttcttgccagatattgtgattcctctgattgctgcaccatcaccctagccgtatgtacacatacaatccattcttcagctcatggcctgtgcagtgtcagacagtggctagacttggcctgtaggccgcagtttgctgacctctgagacagaaccaaggcaccacttttaagctttgagcttgtctttgaacgccagacaccatctagaagggatcagtctgggtgcatgtaaagacctcttgggagtgtgagtgtccaagtaactttatttaaaaaaaaaaaaaaaggcaaggatttgcagagaatgagggagagactttatccaagagagagctatcctggggaggagaaacaggaaactaaaagcaaaggggacgagaatttcaagatgacagcatcctcgggaaattagtgctaaaagcccaatgattactgttacattttctttgctcttttccctctcgtccaaccatcaaatccatgcaatctccaaggaaacaaaataaatttttattcacagtgggggtgggggggtatggcccgtgtccaaggtaatgaaaaagacgaattaccctgcaaatccttccaaatggaccacactcagctccagtgtggagtgggtggagcagagaccagaagcagctgtctcaggactggcctcctaccactttccatgactttttcaaatctaaatttagctactatttataggtgaccaggagagcacaccctcacccgcacccgcaacccctgctgctgcccactggaagggcaaactaaagcttggcatttcacaggtaggcgtgaaagtcagctttatacagatcatagacactgacccggcctttgtcatcccttatcgctgctccaccctgtttgtctacagctgctggttacacccaaggtacaaatagttctttctggaaacagcctgtgggggcactctgagccatacactcattcattctatctgggcattttagaaatagggtaagatttagcttcatttgtgcagccaagaataggaaattgctccccaaaaggtcagatgcctaagatttaatatgcaagcagcctgtaatacctaagatttaatatgcaagcagcctgtaatacctaagatttaatatgcaaacagcctgtaataccaggagcaggcacacctctctcagaatggtgtatcctgcaaagccaggatacactaatgtgttcaagttacagtctgggtgaacagccttaggacctccaagacttttcttatatagtgtgtaggactgctgtgtaggttattcactcagttccttcccagggcctctacagaggccataagaaagacttaaatctgctcagcctcctcttgaagctgtgacaggagagtacttatcttgtggagcctacttcgatctttctgccgcttggttactagctttatagggagagacatattctcagtctcaaaaggaagcaacctaggatgaaaaccactgagaacaaaacaggaagagaggtcccagctcctacaagcacctctctcctgtttgtttgtttgtttgttttaaccttcattgcccctcaaatctggcctctttcagtaggttgtttgtttcgtgaattaaggttagtaatgcaaaagtaaacttccaggtttagagctcagggggaaattatgacttattgtgccccgtagaatactaagtttggggctaattcttgtctttgcccttgaaccttctggtgggacaacggcagattgtctctagtttctactcactactatatgaaaggattagacaaagggacttctgtgtagatgtcttgtactttttatatcccacattacaactgttttattttttcatattatagcttttatatacatgtgtattttttgaggtttttgtcagctgggaatatttgaaaaagcctacaatttcttgtacacattatctccactagttaaaaattatgtgtcactttttcttaaataaatagtgaaatacttgtggatttaaggtagaaatatttatttatatgggctttcttgtgtgaatttaatttgaaaatcaccttcatgtaatagcatgaaaaatttcattgtttttttaaagatagacatttctctaataataataataataataataataataataatacttgatagtataaatctagtgatttctgaattcttcatagtatattaaatcttgagtataatatattggtgcttaaaaccttttaactgagtgaacaaacaggtggataggtaaatatacaaccttttatctgaaaaacacacaaaaactgttttgtcttttgataaattagatgaactaggtactattaaaaggtttgggaaatttgaaaactactgataaaatttacaagtttttttttttttttttttttttggtttttcgagacagggtttctctgtgtagccctggctgtcctggaactcactttgtagaccaggctggcctcgaactcagaaatctgcctgcctctgcctcccgagtgctgggataaaaggcgtgtgccaccaccgcccggttagcaatttacaaggttttaaaaatgtcaaagtgcattttattaccatgcctcttacactcaaatcaaaaactgtgtcctctcgcttggcaacacacagaactctgtattattttcccacttatgctttccaggaaatccaaagagtggataacggtaggcatacgctagagtgatggtaaccctctcatccaggattggctgacacgtgacacaattctaaccaataaggccgtgagtgtgcaccaaagctcccctgggaaagtttctctttgttcttaaaagacatttgga

SEQ ID NO: 241 - DNA, 1875 bp, Mus musculus
tgtgacttcagttcacaccacactctgccttgctcacagaggaggggctgcagccctggccctcatcagaacaatgacactcaggctgctgttcttggctctcaacttcttctcagttcaagtaacagaaaacaagattttggtaaagcagtcgcccctgcttgtggtagatagcaacgaggtcagcctcagctgcaggtattcctacaaccttctcgcaaaggaattccgggcatccctgtacaagggcgtgaacagcgacgtggaagtctgtgtcgggaatgggaattttacctatcagccccagtttcgctcgaatgccgagttcaactgcgacggggatttcgacaacgaaacagtgacgttccgtctctggaatctgcacgtcaatcacacagatatttacttctgcaaaattgagttcatgtaccctccgccttacctagacaacgagaggagcaatggaactattattcacataaaagagaaacatctttgtcatactcagtcatctcctaagctgttttgggcactggtcgtggttgctggagtcctgttttgttatggcttgctagtgacagtggctctttgtgttatctggacaaatagtagaaggaacagactccttcaaagtgactacatgaacatgactccccggaggcctgggctcactcgaaagccttaccagccctacgcccctgccagagactttgcagcgtaccgcccctgacagggacccctatccagaagcccgccggctggtacccgtctacctgctcatcatcactgctctggataggaaaggacagcctcatcttcagccggccactttggacctctactgggccaccaatgccaactattttagagtgtctagatctaacatcatgatcatcttgagactctggaatgaatgacagaagcttctatggcaggataaagtctgtgtggcttgacccaaactcaagcttaatacatttattgacttgattggggaagttagagtagagcaatcaaaaagatcattcattcagccttgggaagtcaatttgcaggctcctggatgagccctgccccgttttcacttgccagcacatttcagtcatgtggtgtgatagccaaagatgttttggacagagaagaaaggatagaaaaaccttctctttggctaagttggtgtttggggtggggataggttagagtatagtacttaactatttgaaaaataatgaaaacacttttttcactcatgaaatgagccacttagctcctaaatagtgttttcctgttagtttagaaagttgtggacatatttttttaatgatttctgaccatttttaatcacattgactcatggaatggcctcaaagcaccccccagtgcttctttcctcattcccggtcatgggaactcagtattattaatagtcacaacatgatttcagaactagatagccctcccacaccaagaagaatgtgagaggaagtaaggtcactttatgtaaaaaaaaaaaaaaacaaacgcgtacacatatgtatgtatacatacatacctatgtgcacacacacacacatatacatacacacaaaatgctatgaagagttatctgtttagtagcctgttatagtcaaatcattttaagtttcaacttcttacagttgggccacttgttgtcctttgtggatggatatctgaaattgtgtctatatattgctagtcatgatactgtgaacaaaaagggtagtgttagtatttgtcagggtggtaaggatgcattccaggaagcttcctctgaggaagggaatgaggtcattcttgccatgtatgaaagacatagatgttttccagaaggcaccattgggagccccagtataa

SEQ ID NO: 242 - protein, 216 aa, Mus musculus
MTLRLLFLALNFFSVQVTENKILVKQSPLLVVDSNEVSLSCRYSYNLLAKEFRASLYKGVNSDVEVCVGNGNFTYQPQFRSNAEFNCDGDFDNETVTFRLWNLHVNHTDIYFCKIEFMYPPPYLDNERSNGTIIHIKEKHLCHTQSSPKLFWALVVVAGVLFCYGLLVTVCVIWTNSRRNRLLQSDYMNMTPRRPGLTRKPYQPYAPARDFAAYRP

SEQ ID NO: 243 - DNA, 51911 bp, Homo sapiens
tatatttttctctaacaagcaatgtggtcgggacttcaatctgctcattgattgattaaagttgtttgtttcatcgtgatgcatatgtccttgaatatcaagggcttatgtggatttaacaaatctggaatttctccagaaaaatacaggtgcacttctatgaagcacagttaattatgacttcccagagccgtttgggccactccacggtttcctaagtgactccatttaagctctaaagagatacaccatgttagatgtcttgcaactgaaaggtaatgaatacccttatgtttttgtcctcataactcttaaaattaaaaaaaatatatacttaggagaaacaaatacaggtttcttttttttttttgagatggagtttcactcttgttgcccaggctggaatgcaatggcgcaatctcggctcaccacaacctccgcctcccaggttcaagtgattctcctgcctcagcctccctagtagctgggattacaggcatgtgccaccacgcttggctaattttgtatttttagtagagatggtgtttctccatgttggtcaggctggtctagaactcccgacctcaggtgatctgcctgcctcagcctcccaaagtgctgggattacaggcatgagccactgtgcccggccacatacaggtttcttacatgcatatattgcatggtggtgaagtctgggcttttagtgtacccaccacccaaatagtgagcattgtaccccataggtaacttttcaaccctcacctgcctcccacctcccaccttttggtgtctctaatgtctattatttcactctgtatgtccacgtgtacattgtttagcttcctcttttaagtgagaacatgtgtgtttgactttctgtttatgagttatttcactaaggataatgacctccagttccatccatgttgctgcaaatgatttcattatttttttggctctgtattattccatggtatgtgtgtatgcattgctgcaaatgatttcattatttttttggctctgtattattccatggtatgtgtgtatgcgtatgtgtatgtgtgtgtgtgtatacattatacaccttttgtacgtgtgtgtgtgtgtgtgtgtgtgtgtatatatatatatatacctccaatgtatagctatagcccatattctttattcaatcctctgttgatggactcttgtgttgattccatatctttgccactgtgaatagtgctgtgctaaacatacgagggcaggtatctttttgacgtaatgatttctttccctttgggtatatacccagttgtgggagtgctggattgaatgctagttctatttttagttctttgagaaatctccatactattttccataaaggctgtactaatttacattcccaccagtggtatacaggcattctcttttctcctcatgattattggctgtttttagactgtttattaatagccattctgactagtgtaagatggtatctcactgtggttttaatttgcatttctctgatgatcagcaatattgagcattttttcatatgtttgttagccacttgtatgtcttgttttgaaaaatgtctgtttaacaagcaaatgctgagggattttgtcactaccaggcctgccttacaagagctcctgaaagaagcactaaatatggaaaggaaaaactggtaccagccactgcaaaaacacaccaaaatataaagtcaccatgaagaaactgcattaactaatatgcagaataaccagctagcatcatgatgacaggatcaaattcacacataacagtattaaccttaaacgtaaatgggctaatgccccacttaaaagacacagactggaaaactggataaagagtcaagatccatcggtgtgctgtattcaggagacccatctcacatgcaaagacacataggctcaaaataaagggatggaggagtatttaccaagcaaatggaaagcaaaaaaaagcaggaattgcaatcctagtctgtgataaaacagactttaaaccaacaaagatcaaaaaagacaaataagggcattacataatggtaaagtgatcgatgcaacaagaagagctaactatcctaaatatatgtgccctgaaaacaggagcacccagattcataaaacaagctcttagagacctacaaagagacttatattcccacacagtaatagtgggagactttaacaccccactgtcaatattagacagatcaacaagacagaaaattaacaaggatattcaggagttgaactcagctctgaaccaagtggacctaatagacatctacagaactctccatcccaaatcgatagaatatacattctttttagcaccgcatagcacttattctaaaatcgaccacataattggaagtaaaacactccttggcaaatgaaaaaggacggaaatcataacaaacagtctctcagaccacagtgcaatcaaattagaactcaggattaagaaacgctcaaaactgtgcaactgcacggaaactgaacaacctgctcctgaatgactactgggtgataacgaaattaaggcagaaataaagaagttctttgaaatcaatgagaacaaagacacaacgtaccagaatctccgggacacagttaagcagagttaagagggaagtttatagcactaaatacccatatcagaaagcaggaaagatctgaaattgacaccctaacatcaaaagtaaagtaaatagagaagcaagagcaaacaaattcaaaagctagcagaagacaataaataactaagatcagagcagaactgaaggagatagagacatgaaaagcccttcagaaattcagtgaatccaggagctggtgttttgaaaagattaacaaaatagatagaccactagccagactaataaagaagaaaagagagaagaatcaaatagacacaataaaaaatgatgaaggggatatcaccactgatcccacagaaatacaaactaccatcagaaaatactataaacacctctatgcggccgggtgcagtggctcacgcctgtaatctcagcactttaggaggccaaggcgggcggatcatgaggtcaggaggttgagaccatcctggctaacatggtgaaactccatctctattaaaaacacaaaaaattagccgggcatggtggcaggcgcctgtagtcccagctgctcgggaggctgaggcaggagaatggtgtgaacctgggaggcggagtttgcagtgagccgagattgcgccactgcactccagcctgggcgacagagcgagactccgtctaaaaaagaaaaaaaaaaccaaaacacctctatgcaaataaactagaaaatctagaagaaatggataaattcctggacacatacaccctcccaagactaaaccatggagaagtcaaatctctgaatagaccaataacaagttctgaaatggaggcagtaattaataccctatcaaccagaaaaagcccaggaccagacagagtcacagctgaattctaccagaggtacaaagaggagctggtaccatttcttctgaaactattccaaaaattagaaaaagagggattcctccctaactcattttatgaggccagcatcatcctgataccaaactctggcagagacacaacaaaaaaagaaaatttcaggcgaatatccttgatgaacattgatgccaaaatcctcaataaaatactggcaaaccgaatccagcagcacatcagaaagcttatccaccatgatcaagtcgacttcatccttagcatgcaaggctggttcaacatacacaaatcaataaatgtaatccatcacataaacagaaccaatgacaaaaaccacatgattatctcaaaagatgtggaaaaagctttgataaaattcaacaccgcttcatgctaaaaactctcagtaaactaggtgttgatgaaacatatctcaaaataataagagctatttatgacaaacccatagccaatatcatactgaatgggcaaaagctggaagcattccctttaaaaaccagcacaagacaaggatgccctctttcacactcctattcaacatagtactggaacttctggccagggcaatcaggcaagagaaagaaataaagcgtattcaaataggaagagaggaagtcaaattgtctttgtttgcagttgacatgactgtatatttagaaaacctatctgtatttttagaatgctgtatatttagactgtatatttagaaaaccatctcatgccagttagaatggcgattattgaaaagtcaggaaacaacagatgctggcgaggctgtggagaaataggaactcttttacaccattggtgggaatgtaaattagttcaaccattgtagaagacagtgtgtcaattcctcaaggatctagaaccagaaataccatttgacccagcaatcccattactgggtatatacccaaacgattataaatcattctactataaagacatgcacacgtatgtttattggagcactatttacaacagcaaagacttggaaccaacccaaatgcccatcaatgatagactggataaacaaaatatggcacatatatgggctgggtgtagtggcttacgcctgtaatcccagcactttgggaggccaaggcaggtggatcacctgatgttgggagttcgagaccagccagaccaacatggagaaaccccatctctactaaaaatacaaaaattagctgggcctggtggtgcatgcctgtaatcccagctacctgggaggctgaggcaggagaattgcttgaacctgggaggcagaagttgcagtgagccaagatcgtgccattgtactctagcctgggcaacaagagcgaaactctgtctcaaaaaataaaaaaataaaattaaattaaattaaaaaaaagaaaatatggcacatatatactatggaatactatgcagccataaaaagaatgagttcatatccatcgtctcagcccaaaaactccttctgataagcaacttcagcaaagtctcaggatacaaaatcaataggcaaaaatcacaagcattcctatacaccaataatagacaagtagagagccaaatcatgagtgaactcccattcacaattgctacaaagaaaataagatacttaggaatacagcttacaagggatgtgaaggacctcttcaaggagaactacaaaccactgctcaaggaaataagagaggacacaaacaaatggaaaaacattccatgctcatgaataggaagaatcagtaccatgagattggccatatggcccaaagtaacttatagattcaatactattaccatcaagctaccattgactttctttgcagaattagaaaaaactactttaaatttcatatggaaccaaaaaagagcctatatagccaagagaatcctaagcaaaaacaacaaagctggaggcatcctgctacctgacttcaaactgtactataaggctacagtaaccaaaacagcatggtactggtaccaaaacagatatatagaccaatggaacgaaacagagacctcagaaataacaccacacgtctacaaccatctgatctttgacaaacctgacaaaaacaagcaatggggaaaggattccctatttaataaatggtgctgggaaaactggctagccatatgcagaaaacttaaactggtccccttccttatagcttatacaaaaattaacttaagatggattaaagatttaaatgtaaaacctaaaaccataaaaaccctagaagcaaaccaaggcaataccattcaggacataggcatgggcaaagacttcatgactaaaacaccaaaagcaatcacaacaaaagccaaaattgacaaatgagatctaattaaaactaaagagcttctgcacagcaaaagaaactaccatgagtgaataagcaaactacagaatgggagaaatttttgcaatctatccatctgacaaacgtctaatatccagaatctgtaaggaacttaaacaaatttacaagaaaaaaacaaccccataaaaagtgggcaaaggatacgaacagacacttctcaaaagaagacatttctgcagccaacaaacatgaaaaaaagctcatcatcactgatcattagagaaatgcaaatcaaaaccacaatgagataccgtctcacgctggttagaatggcaattattaaaaagtcaggaaacaacggatgctggcgaggctgtggagaaataggaactcttttacgctgttggtgggagtgtaaattagttcaaccattgtggaagacagtgtgtcgattcctcaaggatctagaaccagaaataccatttgacccagcaatcccattactgggtatatacccaaaggattataaatcattctactgtaaagacatgcacacgtatgcttattgcagcactatttacaacagcaaaaacttagaaccaacccaaatgcccatcaatgatagactagataaagaaaatatggcacgtatatactatggaacactatgcagccataaaaaagtatgagttcatgtcctttgcagggacatggatgaagctggaagccatcattctcagcaaactaacacaggagcagaaaaccaaacaccacatgttctcactcataagtgggagttgaacaatgagaacacatggacacagggagggtaacatcacacactgtgacctgtcagggggtggggatcaaggggagggagagcattaggacaaatacctaatacatatggggcttaaaacctagatgatgggttaataggtgcagcaaaccaccatggcacacgtatacctttgtaacaaacctgcacgttctgcacatgtatcccagaacttgaagtaaatttaaaaaaacaaaaagaaagaaaaatgtctgttcatgtcctctgcctactttttaatgggattgtttttttcttgttgagttgtttcagttccatgtagattctggttattagccttttgtcagatgtttagtttgcaaatatttttcccattctatagttatctacttactctgttgattgtttcttttgctgtgcagaagctttttagtttatttaagtcccatgtgtctattttgttgcctttgcttctgaggacttgttcataaattctttgcctcggcagatgtaaaaaagagttttttcttggttttcttctgggatttttatagtttcaggtcttacatttagggctttaatgcatattatgttaatttttgtatatggtgagaggtatgggccccgtttcattcttctgcatatagctagccaattttcccagcaccatttattgaatagggagtcctctccccagcatatatttttgttaactttgttgaagatcagttggttgtagatatgtggctttatctctgggttctctattctgttccattgttctatgtatctatttttatactagtaccatgctgttttggttactatagttttaccatgtaatttgaagttaggtaatgtgatacttcaaagctttgttctttttgcttaggattgctttgactattcagctctttttggattccacacgatttttaggattgctttttcaaattctgtgaaaaatgacattcttttgttctgacaattcttaaccccacttcagaccagttttctcatctgtaaaatggagataataataatcttcctcacaggttgtgtattaaatgagatctggaatgtaaagttcttagtatggaaatgctattatttttactgaaaatgttgtagggtctcagtatcctgtgtattgccggatttaaggtccttattttatttctgtcatttctacctcttggtatatgtgaatgctattggatttcaaaagcaaatgtgaaaggattctaatgaaatggtttgcttctttagtgtcatacatgttaaaacataggaaggcaaatgtcaaagtttgtgtttctttttattctatggaaagaaaattaaatatggctcatcaaataataaggccaataatatttaattattgttttgtgaattcgtataaatgagctgacctctctgggctgcagcttccttctctgcaagataagggaattaggccagatgagtgaactgtttctttttcagctaagtttgacccgattactactatttacatagtattaactagatgctatgtagtcatctttaatatgcttgaagacagttattaactcactccttagccttttgttgttgatcatggaaaactactgggtatctttgtttcttctgtgtatattctcagtatgtataatgagtctcagagcctcttgttttaagatctgggtaggctggtggctctagaatatggatgaccttttaggaaaggtcaccttgccatctgtaaattttcccccagatagacttcaggccctggggaaggcatgggttcccctaactggatagaggatcagagccaggaagactgtgtcaaattctagaagtgaatcttctccaggactcagggcatagctttgtcacttacctatagttcagaagtgtgagtgaatcatttccaaggacaaatttctccaaaggaccaaaagatgtgttagtaagaggggttcacaaagactgtgtttgtgggaaaattgaagtgtgaacaaagaaggtctaccaggacaggaaatacttttgatctgtcatttatcagatcaggagggagggacatgaagcctgcctcctcttacagctaggtcatcaaagagtttgactgtagcattttaaaatagcgaagaaaaaaaggtaacaacactaggggtttgttaaacaatttatgatataattagagaatggaatattatgcatcaattacaaataatgtttataaagatacttaaatgacatgggaaaatgttcaagatataacaaataatagtacatatctgatgaaaactataagtaaaacatgatattaaacatgtaaaaatcttaacagaccaacaggtggaaggcagtggaccagaatattagcagtgtttatattagggtggtaagaatgtggatgaatcttgttttaatgcttataatttttctaaacattctcaatgaaatatgccttacttttatagtcagaataaaaagcaatacaagttatcttttaaaacaacccacatacacaaaacccccaactagagtaattgcacaaagcttagattatcaaaaagaagaaaaaaattactggaaaagttttgaagaagtcattgagtacaagatactgacgtaggtgccggaagaagagagcagttggccgtgctggtggaataaccctctcttcaaagggcctgggagttgaagaagggtgcagtcgggtggtggttatgaatctcagaaatcctgccacggagcctccttttgtgccctattacttaaccttgagggacatagagagcatgagacaccaaggggcttttggttgccttactgtcccactaagaacatagaatgttgttttgactttccctttgcttagggaacctcccccagatactcagctggctggctgcttgcacgtagaatgggttttgcaaagttcctagaagtgagttggaggaggcttgacataaatcaagcactgtgtgctaaatgctccagagggctaccttatgtcctacacaaatgttacatttctaatatttgtaactcctttaaacgtttatgcagatgtttcccaattcctcagtagaattcttaccattatctttttgacacaacctgtccccatcctatgaaaatctctcctctgctagagactttattctttctttctctctctcccccttccttccttccttccctccctccctctttctttctttccatctttctttctttctttctttctttctttctttctttctttctttctttctttctttctttctttctttctttctttctctttctttctttctttctctttctctctctttctttcttcctttcttttttctctctccccttccttccttctttccttcttttcttttcttttcttttcttttctttctctctttctttctgtctttcttttctcattctgttgccctggctggagtgcagtggcatgatctcggctcatagcagcctccacctcctgggttcaagcgattctcctgccttagcctccctagtagctgggattacaggtacccaccatgatgcctggctaattttttgtattttcaatggagacggggtttcaccatgttggccaggctcgtcttgacctcctggcctcaaatgatccacccactttggcctcccaaattgctggcattacaggcgtgagccactgcacccggcctgttccttcttaagaacactttgtctcccctttaatctctgctggatttcaagcaccccttttacacaactcttgatatccatcaataaagaataattcccataagcccatcatgtagtgaccgactatttttcagtgacaaaaaaaaagtctttaaaaatagaagtaaaagtctaaagtcatcaaaacaacgttatatcctgtgtgaaatgctgcagtcaggatgccttgtggtttgagtgccttgatcatgtgccctaaggggatggtggcggtggtggtggccgtggatgacggagactctcaggccttggcaggtgcgtctttcagttcccctcacacttcgggttcctcggggaggaggggctggaaccctagcccatcgtcaggacaaagatgctcaggctgctcttggctctcaacttattcccttcaattcaagtaacaggtaaacaatgttaatgtctttctttctgtaaatattttttgaggtcttccaattggcttagtttattttaaatttctaacaatgtgtgaaatttgaacatttgaagtgtagttttgctgtaatagggcaatgtgttattttgaaaatcattgattctcagactacaatatagtatcttaacaaaagtcccttggaaataaattttctaagctattagtttctctagctattagttgatagtgtcccaagaatttattattattattattattttaaattgagatggggtttcactatgttgcccaggctggtctcaaacttctgagctcaagcaatccacctgcctctgcctcccaaagtgctagggttacaggcatgagctaccatgcccggccaataatttttaatttatgtatcgtttctttctttctttctttttttttttaatttaagaaagctgctgtaagtagattggctctggaagctctgaatttaggttgcctatgttcctaacacaggtccaattctcactagctaagcttaggcttagctattatttaaactctccaaacctcagtttccttaactgtaaagtgggaataataataaacctcacctcaaggtcattgtgaggtaaaatgaaataatccatgcgaagggcttagctcagtcaggcttcaagataaatgtgaactgtaattactctatctacctgaattgaatgagttccaacatgaattctggagtcaccacagaagctgctacaacaccaatattaataaattagttttcttttacaatcggccaaaatgtattttcttagattaaaattctttaagttcccaatgacgatgatgaggaggataatacatctagcactttgagcagcacacagttctcgtaactagaaggtaggtattacagttaacttcatttcagatgaagagactgaggggtaggcacattaagggatttgcccaaggatgtacaggtggcagctataggaggcagggtctgaaccaccttagtctgactccagtgccggtgttgttgattattatgctattccatctaacatggtgtgatttgtaatttcatggactcaggtaaatccagggttaaattaacttcggaaaatcacaagcacaattcctaacagaaagaatttgttacttgggtgggctggagtaagatgctcattcaacgtgttctcagagttagaaaaaggcccccgcttggttcaaaaactggactgataggggtcaacagtcatgcttaaataaggacagttatttttccctgaaagatacattgaaaagccagtatcctcaattttctttcttattttggcagtacagagactgcattatttgttgttattcttaaacattaagtgtacatagcccaaagagtataatttcccaatctgcagaggtacagtagttgcatatatacccgtttattttatggtctgacgtaccagtgagcacaaattgtgtatatttataaaacgtgttgatataatgaaagacatgagttggcaatgagatctggtaccaagcgtttacagctaccaaatatattctacaagaatctttaacatttattttaaaaaggtcaaaccttatttttaagagatctctcaaacttaaagaatatttaaaattacttaatttgttagacagtcaagggaagcctaccctgactgaaaactatttaaaattggtaattgtacactaaatacttttctgatgtgctttgtggacacctatctgtcatcaacttattcactctcttttgaagagtttttggtaagactcaaaactttgtatgttttctttagaacatttattaaaaggggactagctagataagtggttggagagttcacacacatagggcctttgttttctactttgacatatatttacttttcaaatgccaattcacttttctagtaacttttagcatttgatactgagtggctatctaatgaagaaggaaagagatgggagtgaaggggacacttttacagtcttttccagtaagaaaacttacgagcaagaaaagaatgaccacataaaaaatgtatgatttggcctggtgtggtggctcacgcctgtaatcgtgggacgctgaggcgggtggatcacttgaggtcaggagttggagacccgtcgggctaacatggtgaaatcccatctctactaaaaatacaaaaaaattagcagggtgtggtggcatgcgcctgtaatcccagctacttgtgaggcttaggcaggagaattgcttaaacccgggacgcggaggttgctgtgaacttagattgcacccctgcactccagcctgggaaacagtctcaaaaaaaaaaaaaaattatgctgcattctaatcaaatagtgcaaagcttcttgtgtgctttgcctttctctgtacacaccttccattaagaaattatagatagggaaattctctggtcaaagtgtaactgtccttcctaggtctgagaaaccactgttatgcctgtgttgagatgtgtatctgtgtgcgtgcatgtgtgtgtatgtatgtatatgaagaatagttcttttttccattaatttaataatgtgtgtgtatgtatgtatatgaagaatagttcttttttccattaatttaataatgtaacttatttgtttacagcatagcttaaaatatttattctataaaggttaagtctaacctgattccttatgagttggatgacagtgtagagagatatttatggctaagttaaagaagtgtgatttaggaagagtgaggaaaccttaacttagataagccctttgcatgttttctactagactcggataattgtgcaactgagatccacagagagtattttgctggactttgggataggagtccagcccagaactacagagccttaagagggaaatgctctgggattgatgatagaaggatggtatgcacaaaatacttgacattggtcacatgtttcaggccatatttgctattttttagcaagcctaatcatccagtgtgaagagaaaaatcagcatattaccacttatttttccatgagatcattccttttcacttctccaaaacttgggcaaaaaactgtcaaaatggccagtttggacaaagctaatttctccagcgccttcccttagcgcttatttttctgagagaggcatggaaagcaggaaaataactgacatttaataaaaagtcatcagcaaagcaattaaaaattttatttgtactctagtcttcagccaatgactcccctgagctggttgtatacggaaagaagtaatttgtttctcacagttaagtgttgctctgagactgggcttgggaaagtaaggtgaaaagatgaatgtcaaaaaatcaacagattgccgtatttacatgacttccaatatgctgtggccagtttttctgttaaaagaaattgactggatgtttttgtcatttcaagtaaatttgatggatatttcaaaagtataggcattgcttaaggatttgttttactctactaccgtgccctagttaacacattgtgttttttaaggcaaccatccagcaaggacgtttacagcaaggactgcaaaattaatatcaatatatcaataccaggaaatggaatgagtcattgccacagatagattagaaatagaaatgaatctgtgattgtaactccaaagctctcacattcaaacttttactatgggtggggagaggatctcgctgcctccccttctttaagacatagaccctcctcctttttaacgtcttatgccttttttcaagggtggagaaatgccatatgattaccatttggcttttatcttgtgtggatatcttcctccaagtatttcctgcaagcagtgtgctgacatttacaaaaggaaaatttttatgccaccaacatcccagaagaaaatttgttgtggtttatcatctctaacacaaaagccctttattaactagtgtaggcattgatgaggatacgcaattcatgtcagacttggttgtctaaaaatcagaggacggacactccttcaaagcacaattgtttcccagcaggtcatggcaagggatagaatcttcttctctttctcatgttggttaaatttttgtttgcctttttcttcaagaaatttattatttatggaacttcacagaggctggaacttttcttctcagtacatagttgagctgagcatctggaaaaattacatctgggtggttttgtgactgactgaatggctctctggttaagctgtgttaagatatctgtgtctcttttacggtgatttatttggccgtttttggccaatgacagggtgttagcaccaaaaacccaaaaccaaaaaaaccaagacaattcactcagagctttgagcctgataattatagcatgagaattggtgcctgaagctggggggaaggtaacccaggccccacagagaggtggttgcatgcaagtgtctaactttttccttgttaatctcattttgaggactccaaacactagaagagaagtgcactggataggatcaagaactactcagtcatttggtagaggcttggaaaaaagagtttagacttctcactatttcaatgttaatttcaaaggcatgtttatttagtctcgtgtcaccatgcaggttatatgtgcttctgttttcattgctggaagagaacctgcaaggtggtggagaagttcttacttaactttgagctgctcccttatctctgcattaccattactgtcatctttttctttgtcatcatcttcattatcttgggtattgtggctgacaatataaccaggttaatggttcctgatggtatcattcagaattactcactcatagttcactttggcctctgatctaattgtgagcccctttctgcaatatctgaatcacctcattggctcacaatccaccatgtaatctacttgtctttcatgttagacttttcgtgaaagatccacctcctcgaagaagcttctggatacttcagcctttattgtggtcttggaagaggagttctgatggaagtgtatctcaacttaacaaatatttattaaacctctcatattttaatctccatcagagtttcagagaatataaaaagaaatataggccggatatggtgcctcacacctgtaaccccagcactttgggagaccaaggcaggcagatcacctgaggtcagaagtttgagaccagtctggccaatatggtgaaaccccatctctactaaaaatacaaaaattagccaggcgtggtggtacacacctgtagtcccagctactggggaggctgaggtaggagaattgcttgaacctaggaggcagaggttgcagtgagcagagattgtgtcaatgcactccagcctgggtgacagagcgagattccgtctcaacaacaacaaaaaaaaagaaatataaaatcagtacacaagtattgtgtagtacaagtaattaggtagttaactgagttctctctgcttttacagcccctatgatttagttgagtaggttatatataataggaggatgtaacatctggaaacagataaataacacttggcagtcactacctcaccatgctatttgatgactaaaggactttggtttgcctacattatttttataatctgaaatgtcctctacacctctcacctgaagaagccttctctgagaccccaaatggcaaagagagggacttccttccctctcaagtttctccaaattattactgtgtattgacacatttattttcttttccactagactatgaactccttgagggcagaatcatgtcttattcatccttctaacctctgtattaggcacaatgctgtaagcatatagttactcaataaatatttgttgaagaaagaaatgaatgaattagtaacaaaatgaggaagcataaaataaatactcgtaagattaatgtagaaaggtaagcctttatggagagttgggaattagactggacagtagacaagatttgaatgaacgttgttattaataataattgctagctaacatttattttgcacttataatgtgccaggtagtgttctgcctggctttccctgtattaagtcatctaatctccaagtcctatgaggtagttactatgattgctatgattatactatttcatagatggggaaactgaagcacagagtgggtagagcatcttgcttatggtcacaaagctactaagtatgtaaatccagatggtcttgctctggggttcatgttcttaccaatgctgtgttgtctcaggaaggaaaaggtggattaataaagaaattaaaccaggaatactgtttcatgttctcagaacagatggcaactctgaatgtgtgaggttatggtgaagcagcggagaatccagttaagcaaaggatagaatactggtaacagaaattcaaactttattttcaagtcattttgaagtaatggcctgggtaagaagaaaatatttcagaatccttatctttggaatgaagctggagttatgggaatggatggctagtcgaaaggagagggcataactgtagaaaaacagagagtggagctgaatctggaaactaactggctctgatgggagtcagctgaaaaggatggttagctagtgaaggagacaaagaaagtggtgagagaggcagggggacacagtgaggctagtggaatgccactaagccaatgagggaaagagtttcaaaaagatagtggttaatagcattaaacataagagggaaaggagtgaataatggcttgggatttggctgaaacgccacctgggacttttgagtttaggcagagacatggagaaggaagataagacttcacaggattaagaaaaagtggagggggacaaaacagagacagtgaaaaggagaggaaatagataaggtaaagacaattaggaacttatatcacctaaaatgtctaccatggtattttgtgcatgtaataataaatgtttgcaaatggctgagtgacttaagtatgtttgacatgtggaaggagccaagtgctggacctgagagagagagagagagggagagagagagagagagagacagagagagagagagtgtgtgtgtgtgtgtgtagcattgcagggcttgagggtagagaagggtattattaggaaagaaaggaggaggagggagaggaaaaaaagagggtggggatagttttctcaaggagatagggagggagatttgttgcataggagatgagtgtattagagagaggaggacaaatctctaagaagatggggaggaagagaagagacttataggggtagagataagttagaatgaagctatggtagatgagtgattctatactggtgaacctgaggttaaaaacaaacaaatctctcagagtaggtcatgatgttaaacctatatcaacaagggctactgggtaatacatgccttctctctgaagactttgcccatgtgtactttaaattcttgcttgagtcctcaacaatgcacactatggctaggcttgacctcagctcacggctgagatcacagggtcacagggttcaaaccaaccctgcccaacattatgggcgggactccagtttccagtcagggatgttaatcttagcatttccctgtgtgttttggaacaaggatatggttgcttgaccttggcttggggaggccagtccgctattcttttgccctctcttttttcaaactcaaaagctaatcccaaggatttctcaaggtgggggatgtgattaggagtattagtctatcatactgtgacagaacttttctaggcctcggtttcttcatctgatacatgaagagtttgggctggaggatatctcaggtctactttctggcttaaaagtgcttctgaagtggaattttttaaaaagctaacttttgtcgggtctaacaaggcagctcaactaccccatccccttgtggatgctcttatgacctgatagagcaaatacaagaaattagaaaccagccatctctgaaatcccttgcagggattgctaaccaggatcctaaatgctgctaatgtgcttagaaatgactgctggacttcgagggggcaatgctgcctttgctatctcctgttttcctatgcaatgttaaggtccaacacagtaattatttaaacttctgggccatgacatttacctggaggttctgtatatgacaaggtgatcctgagcagattcttcagaggtatgtgatttaggcagaatggaacagacaggaaaaatgtactgttgtcttcatcacagagttgttttgaatgagggatcaggataattgtggctcaggaggaaaatatggctctcaaatttggttactagattaaaacatatatttagaaaataataaattaatagaggaggtctctttatacctgtgggttttcttttgatccgttaactgaattactataataatatatatgtacagaaagctataattccctggttacctcctatttagactacaggcaaccttttagaatagtgagatttgattttggggagttgtctggtggctcttggtatgggttccactttcatgtaagttaaggtgctcttgctatgttgtccccttagattgtctttctaacattaggagatcagaggaaaattgcagacctgacctgtgaacggtagggattgggtcacactgcatctgagtttatgttgctttgggttaggaagttttggtcccagagcactcacatcctgcattgctgtgtggtgtctctgagtggtagggatgggttacagcacaggtgatggtttttagcaattttaatattaactgtcatcctaatacatatgaacttcctaatgtacatttctatccccaactggcttcctcgaactctagtcctatacttctaactccttctggatctttcctccaggatgaacaaatttcctcttaacttacctcattttgtcaatggtgcctccactcatacccttacccagtgcgtgaactctgggtcggtttccattcctgttcaccatcagtctgtaaaactgagcaccaatgccttgtttgaccctttcataccagctgccacctccacagctcaggccttatgaactcacatcagtgctattgcatcagcctcctgattggtctctgcctcagctcttcccttgctccaagccaagggcagtcaagattgcttgctgcactcctcaaggctgtgctaaccttcccaaagcagcatgtaccacaacattctcaactcagacatcttcagcatctcccatggcctttctggtaaaatctatgtgccttttcttggctccccatgactggtattggccatcttcacctgtttccatcctacataaatggaatactctgccagttcccaataaactctcacactaaggtcatttccatgatcttagcctgtctaaatttgccccagaccttatggcccagctaaatgtgaagtctctacaaaagcctccagaatcatcctgtctggaaacaaggcttctttcgcgtgcctgtcaatgaccctttaaagggttcatgtaccacggatggcttcggagagtagctgattgtgtacctgccttcggatttctcctagaatgaaacagctctgtcttttacatcttcccatctcctaagaatcaagtacattaagtcccttatttatttgatgaataaatgaatgaatgacgctgtcacagcagaagtcagaataccaaaggacgattctgtgacacatcaaaatttcttctcagaaagtactcattgattgtttttgataacttttccctctcaaaaatgaatgccttaggtcttggtgctcatatgggactttttgctactgaactatctgacctttgacttactttctgacagttacatgtagcacaataatttttttaagaggacaagaacaagtgtcctctacattatagtgtctgcctgtgtaggaacacaaataaaggttaaaggtggggcttagattagtgctgaccaaaagcaacttctttactaaattatttatttatttgagatggggtctcactttgttgctcaggctggagtgcagtggtacaatcaccactcactgcagccttgacctcctgggctcaagtgatcctcccacctcagcctcccaaggagctgggactacaggcacatgccaccacagccaggtacccccacacccagctaatttttgtattttttgtagaaatggggtctcgccatgttgcccaggctggtttccatctcctgggttcaagcgatccacctgtgtcatcctcccaaagtgctaggagtacaggtgtaatccactgtgccaggcctttagtaaatttattaatcaggattctatttctatttatattgttacctataatcatttgtccttgttcaaactaaaacctctttagattttgttttaaaaccatactttctgtcaagaacagttaatgtgcttggtataactgatagttgtgatatacacaatcttggccaaagctggttgcttggtctgcttctcttgatggaagtcattgcttctgtcatggtggcctccactacacaactctcttgccttctggttctggtaacttcgctgtcccctggtctctttcgacctaagggtggtcataattctgctgctgcaagtcacaggctctggcactacccctcgtggttctgctcttgccacacctttgccaacagtcctttcataaataaccttcctactcttgcccaattttgtgtgtgccatctgttttcatttgggatctggaatgagacaacatatagttggcccactgtatccacgggttatgcatctttggattcaatgaaccatggatcaaaaacagtatttgtgggatgcagaatctatggatacagaggaccaacaattgcatgacttgagcttccatggattttggtatctgcaggggtcctggaaccaacaccccatggatccagaggaccactgtatatgcatgtttatcaagcttattcaaagccccctttttctgtgtgaagagattttccttaaatcttcatttcttgtgaaaatgggaagactttcaagataacagtcaacagaaaactagatgaaatgaccacagaattatttttaaaccataacttgcattattatcattattattaccattttttcattttaacatgaatttctgggagagagaggctgggtccattcaaagcatggtaggtcatgaatagctttgtttttatcttcattgcagctcagagaggatggtgaaaggtgctacagtctggtgaatgttttgtacttctctttctcttatcagaaggaagccaggccaccagctaaggttatcagagccatagactgttgagtccccctttcttctcagggagcacggtttgtctcacagtttcctgagcaaccaccgggttgtcttgtgggggagcctaccccttacagagcctgaaaaggagccagtggtcagatggtcacgtgttgaagggcatcctgggcctgaacaggaaatatactcagaggaaagttacagtaacttaactagctctgtggtcaggagggaggtgctcttctatgccagggaaatcagcatcaccttcacagtgtgctcacaaatatcacagggcaaaatggctgaaagtagaagctttcattgtttttggttcctacctaacatgtgaaattctgttcagtccgaatttttaaaaggaaacaagataattagaatcttacaacctgatttttcaactgcaaaagaaagtcagactatgatgtgcataaatggaacctgataaagttcttaaagattctggaggaaaatcacattttgctaattaatcatgtattccagctctctaactgcttctttagcttcccagtacgttttatttctctatggtgctacgataaagaaaaggaaaaactatgacaaacaaatgtaattcacaaaagccctgaagttaaggattttcctagtgaagttcagactgaaatgtgatttcatgtgttgactcatgtctatgttcaatcccttttgtacacttgggtaagctagaatggaagatctcaatggtataattattacttgtgcatcagaaataatttataagattatttgatgtgatcatactgtctgtaagccttatctgggatccatctatgaccttcaggaaatcttcaaaattgtaagcaaaatgttttgtatatgtgcattagaggcaaaaaatttggaaatgtatttttttctagatatgagcatgaaataaattcagtcttgctgaatgaacaaagttgtttttctgtccatttatgatttaaaacattactcctagatgtctaaataaataaattacatcttagctcttccattatttgtgtgaccttgtttgaaaagtcatttacttcttctctttttttccccccaatagcctcttctttaaaataaggaattggcatagatcatctccaagttcccttccagttgagtgtggttttttgcaggataagactctaataaaatagtggggaaaatgaaatgtattttgttctggtcctcttcccattccattcactcccctacttaatggtaatctcctccctaaccctcactccagacatctggtaccatcctccctatcaagtccaactttgagaggatctagaaccaatcactgcaattgtgttgaaattttgatgcaacatggcagaaggaaatgaacaatagattagaagtcataagttatgagcttaaatttcaaggatcacttatgtttcctgtaaccttggacaactcatctacctctttgacctcagtttccccatctgtaagatgggcataaagatgactgtcctgcctatttacttcacagttgaatatagagttcagatgagataagagacagcattttatagccctgtgaatgtaagccatagatactaaattaagccaatgtgtttcccatattgcattttgggcttcattttctttggaaatctaagcattaactgagctggtgggagggtccttttaaggtcagggttctttgatgctgggagccacaccttagaggtggttaccaccccacctatgcagagggttgacctcattactaaatatggtaattgacccgtttataataggtgtaaacggcaagagttgtttttttttgtaaccaagcttccccaccacccactgccattctcatggaagttcaagcaactttcaattttcctgaagtcggctgtttcacaagattcacagattatctgtgggaaatcttttagctctcagtaccttgctcacaagcagcagataagtaccttctcacctccaatctcactcttcatgttgcctgttgttaagcaggagctgtgagggaaagaggtttgaggttagtgcttcctgtctccacacctttagctggtttagctgctaggaaaggctttgaaaagcaaagcactaaattcaccttcaaaacaacttgtcaattcagttagagaaatgtcagtcagaccaatcttttgataacgtaagcaaagaaaatggatgggttgacaatgtttcttttaacctagtaggtttgacctaggtagaccttacctgaacactcacaagaagtaaaatcaaatattcacagggaaagggctgggtctcctgatacccaagtagcctaagaagaatgccttccactcctagcatgaactggaaagcaaaaagaaatcaaacacaagttaggacgagggagctacatatttgggtttcttctgagtctagatatgtccttacatttgtaatatgtccttacattatttgaagtactgtggattttcagaaactcagagaccgaaaatacatatcaaagccaaatgtcatctgatattctgattatcagctactttgatttctccatgtttttacttcatagagcaaggggtgtgcatttttacacatgccccattttaaaagaaaataagagaaatcagaattattgtgtttactcaaagtcacaatgatcacacatattcagtatcacttagagtcactggttatctttttctagcaccaaaagtaaatttctctcatttactgtcttgcaaagcatatagagattttgaggtcctgtgagatagtttcctatttaggcttctctgaattattgacatgaaccaaggtgggaccaaatgctatgaggatataaatattgagaaacgagattttatcagccaaccttgaactcagcttgaactctaaactaggaggctgttagctacatgttaacacatagtaagcaaacgatttcaagcacagtatctgtgtttgagagccagctaatttaaaaatgatctatgttgacaaagaagagggaggaaagtaaacatgagcaataaattggatggcttttcctcaaatggccttatcgaaaacaaatagttttcaagctcttttccagcaaaatcttagcacttttctgcataaaagccttcagtagatcttcatcaccttcagaagagagcccaacctctctaatggagtgaactatgcttgctctgacaatcttgtcttttgtaactcatggcccagcaaaaagaaggtagctgtaattccccaagtcggccacactcttaccctcctcatctcccttgcccagactactctttttctctctttgtcttatcctccccacagtcccctaactcaccccagcccaaacacacactctcccacctcaccccagtccccaacacaaagacacgtcttagccaggctaacttttacttagtaaaagttggtcaaatccatgtatgcatactccttcaggactcaggtcagccgtcatctcctgagatccttagctggtttccctgttgcccccggaagttttgtgcagatcactgtgtcactatgtttaaagtagggtctatttatatctttcttccccatcagatcatgagctgccgtaggacgggaattgagtggcattcatttttgggaaatcaattcttctctcccatgtgcatcttaggaacatgtcacaccctgagttagacaggacatattcagcaaaccactggactctagatgccacagcttttcttccttcctctctctcccttccctctctccacctcactgtgtgtgctgggagagggagtcaaactggggagccatctggggtttctctccagcccacccacactccctttttttgtctccacaaagaagtcctattctcattcccatctttttctttaaatcagctcacaaaggcagatcaggaagaatttgaatgtgcattaaaacagaatccaaataattagcaatagaaacacaattcccagggcggtgagcaagcagaatacaaatgcctaacctgcactcactctctgaaaaggaggagagatgcaggcattgcttgctggagttggttgctcttccaattagaactgacctaatgactccttctaagtaaaaaaaggaaacaaacaaaataaatcaaaaacaaaaaaacaaattggatgtttgtattaagacaggtcgaactttttgattctttgcatgtttatttttcagtgcttttgcaaaatatttgtggaacaaataataagtgaagttaaagttgttgacacaggtttccaaaaaggatttaatgagatggtagtcaaacctagctgctgataacaacaatacagccgaatcaccatctttcactccacaattattttatgagagtctattagtcatactgtgttatgtaaagaagcataacatgtggtcctttctgtcaagagacttggaaaccaggggcctaagggaaatgcacatgaatccaaagctaagcaaattgaagcatgtgaaacaagagttgtttaaaaggtagaactcaaatgtcaagtgagcgatacagatagtaatcattttgagacctgagaagggagtggtgctctgtgccaaggagttagtagacaaggcatggaggtaggaatgctcacagtctgttcttgggatgttggcttaaatggtctaattaggagggcttcggtttgaggaaatgaggttggaaaaacctgtggaggccgatttgaggataagaagttagttttcctctgttaggccactggttctcaaatttgactgccatctagaattactagagaaacttaaaaaatatgaatggatgcctgggtcctatacctagagattctgatttaattggccttggaaaaccaaaggcttttagatttttccaggtgattctaaatatgttgtcaggtgaattccactaggccatagtggctttcaacccaattgaatattagaatcaagtgggggaacttttaagataatatgaaagacaatccacagaatgagagaaaacatttacaaatcacatatctgataagaaacttgtatcaaggctgaggcaggcagatcatctgaggtcaggagtttgagaccagcctggcccacatggagaaaccccatctctactaaaaatataaaaattagctgggggtggtggtggtcacctccaattccagctactcgggaggctgaggcaggaggattgcttgattctgggtggcagaggctgcagtgagccaagatcatgccactgcactccagcctgggtgacagagtgagactctgtaaaaataaaaaaaaaaaagtataaaaaatgcatacagaactccaataattcaataataaaaagataaatagcctaaccagttaataaatgggcaaatgatctgaatagagagttctctaaaaagaatagaccaatggctaataagcacatgaaaagatgcttagcatcattagttattagagaaatagcaaatcaaaccatgatgagatatcacttcacgtccaccaggatggctataatagaaaagatgaacaataacaagtgtcggcaagggtgaggataaattggagccctcattcactgctggtgagaatgtacaatggtgcagttgctttggcaacagtttgacgattcctcaaaaagttaaacatagagttaccatatgacccagcaattttactgctggcaaatacctaagagagttgaaaacatacgtccacacaaaaatctgtatgcaaatgctcatagtagcattattcataatagccaaaaagtgatgaatagaaaaacaaaatgtagtatagccatacaatggaatattatttggccatgaagagtgaagttctggtgcatgcaacaacatggatgaaacttgaaacatggatgaaacttgaaaacattatgctaagtgaaagaaacgagacacaaaaagccacatattgtatgattctacttataaaaaaagtccagaataggcaaattcatagggccaaagtagatcagtggtttccagggatttaagggagggaggaagcagggtgatggtaaatgggtatggtatttctttatggagtaatgaaaatgttctggaatcagatagtggtgattcattcataactttgtgaatatactaaaaaatctctgaattttacactttaaaacagcaaactttatagtacctgaattatatctcaataaagttattatctaaaataaagaaaaaaaacttagtatcaatccttccccccagcctagaccaattaaatcagaatttccggaagtgggaggacttgggcacagatattttttcattttaaagttcttgatataaagccagcaatgattttttaaaaataattttgtagagatgggttctttctatgttgcccaggctggtcttgaactcctgggctcaagcattcatcccgccttggcctcccaaagtgctaggatcacaaaggtgtgagccatcatccccagccagcattattgattatataggagacaaaaagctactattaatttagttctatgccatttccttcttaccaaaaccaaaacaaaacacctgtgtatatgaattcaaattcagttaaattgtaaatttcatttaaaaatgaatctgattttatttggctcttcagtgtgggtatacgggatgttgcttcaaataaacttaaaagaaatgcaagtaggtaaataattattaacataccccaaaacaagagcaaaaaaatgcttttgtttgcattgaaatttgaatcaaagacacaaagtggtttgttgttttagaaaaattcttgagggccaggcgcagtggctcacacctgtaatcccagcactatgggaggccgaggcggtggatcacctgaggttgggagttcgagacaagcctgaccaacatggagaaaccccgtctctactaaaaatagaaaattagccgggcatggtggtgcatacctgttaatcccagctactcgggaggctgaggcaggagaatcacctgaacccagagggtggaggttgcagtcagctgagatcgcaccattgcactccagcctgggcaacaagagcgaaactctgtctccagaaaaaaaaaaaaaagaaaaattttggaaggtgtcttggttgcaaagttgattctcagtttctcagtgcttcagtggtctatttctcaggtggtcatagccaacttgggttttagttctggctttgctcaccatttgtttggtgacttcagacaaaccagctaatgtttctaggccttatacaatcattagaaaagaaaaaaaaaaagaaataatattgtcctgtgccaacaatgaggataccatgggaaatgagatcaatgtgttctcttcacttatggagttgataaactagtttcaggttctttgcttttaaagattgaactaaatgctctccagattctttgatcttttattgggatagcagtaaaggtagatgatggaccagagagataactcccctctggagtctttcacctttcatgatataagggaatagatctatgaatttcttggggaggctattctctgaatttggtgcagaaaacacattaaagcaaactcttgggttatattttttcttatctcttcatcccactcttgcaatgggcaataaacaaagtaaaaatgtttcaaaatattttaattcctttacaaaaacctgtatcacaacttaaaaacaaatctatttgtaggttgggcttggtggctcatgcttgtaatcccagcactttgggaggccaaggtggtcagatcacttgaggccaggagtttgagaccaggctagccaacatggtgaaaccccgtctatactaaaaaaatagaaaaattagctgggcgtggtggtgcatacctgtaatcccagctacttaagagactgaggcaggagaattgtttgaactcggtgggtggaggttgcagtgagctgagattgcaccactgcacttcagcctgggcaacagagcaagactctgtctcaaaaacaaacaaacaaagaaacagatctatttttgtgtctgtgtcaggcactaaagccacctccaaatatatcactcagtcaggaaattggcccaatgcatgattaatattaatgtctcaggaatatagatttaaaaattgtgagtgcctagctgtggtgctcaatgctaacagaaagccatgtactgccttctgggtgaaaacatgctccattgttccattcaaaagaggatgaaaataatattgaaatgttaacttttgaactctcagtataattatcccctgaagaggtcctacatcttctgccaagagaaaacctttgctggagatctgttcatttagttaattaatatattttgctctcaggaagaaaaattatccttatattcttgttctaagcaaatgatttttttttcccccaggaaacaagattttggtgaagcagtcgcccatgcttgtagcgtacgacaatgcggtcaaccttagctgcaagtattcctacaatctcttctcaagggagttccgggcatcccttcacaaaggactggatagtgctgtggaagtctgtgttgtatatgggaattactcccagcagcttcaggtttactcaaaaacggggttcaactgtgatgggaaattgggcaatgaatcagtgacattctacctccagaatttgtatgttaaccaaacagatatttacttctgcaaaattgaagttatgtatcctcctccttacctagacaatgagaagagcaatggaaccattatccatgtgaaaggtaacatacaactttaccagtgtaccaccctaaagtaatggttttcaaatgcagtcctgaaaactgggttgtggtcagtggtggggttgaataaggcctaagtgatttgatactaacaaagacaaataatgttttcagaaaaatttttccctttactgtagaggagattcaaggttatattttgaatatctttattttcctttgctgacattgagcgggagagtaagtgatgaagttaccgcatgtgggaacagatcatttttctccattccagtggatcatggcagaaaagaggttaccattaaaatataagcccaggtgccctcaagtaacagctgggtctaatgggttaagactcaggaagactcacttctatttctaattaattctttttttgtgctccataatcttcctctgtaaaagtacctttccattttctttttccttccttccttctttccttccttccttccttccttccttttcttttctttttctttttctttttttttgagacggactctcgctctgtcgcccaggctggagtgcagtggcgggatctcagttcactgcaagctctgcctcccgggttcacgtcattctcctgcctcagcctcccgatcagctgggactacaggtgcccgccaccacgcctggcttattttttgtatatttatttatttatttattttaattaattaattttttttttgagagggagtcttgctctgtcgcccaggctggaatgcggtggcgcgatctcggctcactgcaagctccgcctcccaggttcatgccattctcctgcctcagcctcctgagtagctgggactacaggtacctgccaccatgcccggctaattttttgtatttttagtagacagggtttcaccttgttagccaggatggtctcgatttcctgacctcgtgacccgcccgtgttggcctcccaaagtgctgggattacaggcgtgagccaccgcgcccagccattttttgtacttttagtagagacggggtttcaccgtgttagcaaggatggtctcaatctcctgacctcgtgatctgcccacctgggcctcccaaagtgctgtgattacaggcataagccaccgcgcccagcccgtacctttccattttctaaaatatacaaagaatgctggactagaaaccgggggacataaaatttgctattaatcaactgtgtgatcttggataagtcacctaactttttcatagtcaaaaactcagtacaactgttaagcagtatttgtgaattagtgaaaataagtctactgaacttttgttgatgttatgttctgcctaaatgttagggagaaaaatcatgattccccaactcagaagaatacagtattggtagcaacaagtaaagtttgattttttggtatactttgtggatatatcatagcttttcatttttgtggaatgataataagaaacacatatgttcagttttgtactgaatcctagcataatgccaatgaatggtttttcttcaatgctggaacagagccatgctgatgaaaaataggatactaaataaggaaagaattgttaatgtggcagataagcttttgtgttctggcaaaatagagacaattaatgtgtgaatattttgtttgctgagtcctatttagatttctaatatctgtaatatccaaacagaatattttaattgtatcaagtcaaaggttaaaaaattatgctattttgcttgtagctaagagtgaaatattttttcctatatgaaaggcatgctactttaggatagtattttatatatatgtatacacacatatacacatatcatttatgttagaactgagaaggacaccaatgatcctgtacttagtaattttcaatcctatctgtatattataaatctgagtaggttttaaaagaaataccaatgcctagttccagccctgagattctgatgtaattgatatgggttgaggaaggggtgctggacatcagtatattttcaaactttctcagataatttattgtgcagctaggatggaaaatcaatggactagaggatttttggtatgctttctagttctaattttctccaattttgaatagaattctataggttccttctcatccccttttgattcctaaagatataaagtgatttgtttgtcattatataatctatgagacagggttggaactagaaatttatcctctgattagcagtccagtgttctgactgccatattaggctgatgattttcttaaggcttgaaaacatgcatattatttaacttattccaaggatgcagtttagggtctagattaactatcttctgatgggagaaagggataaagttaggttaaggccattggaagtcaccgttttgaatcacacagtagaatccacaaagtcaagtgaatacaagtctaccagtgtaccatcctaacgtaatggctttcaactgtggtcgtgaaaactgaccagatcatggtcagtggtggggttgggtaagtctcaaagaggaaatctattcactctaagctggtgatatgtttaatatttttatttctttcacatttttctctgatgttcacaaggaaggaaatgcactcaattgctattcctgtatcatttaatccactctattttgtttttcagggaaacacctttgtccaagtcccctatttcccggaccttctaagcccttttgggtgctggtggtggttggtggagtcctggcttgctatagcttgctagtaacagtggcctttattattttctgggtaagagaagcagcactgcttttatgtaacttttccactgcacatgaaatctgaacacattcaagaattttgcctatgtggtttattttctgtttaatataggatgatgattttcttttccccatgcttgagtaggttctcttttagcttgttcaactctatctgagataaaaatctgatatgagttagatttcccagaaggcattgagtaggtggtgaggcaaaataagaagctaaatgggtaaattagggtggagggattaggagcagttgcctttcttctccccattttgcaatataattatgacacataaaacagttttaatgcgtatatatgtataaacacctaggcaacttgggaagctaggcaactgaagccaatggacaatgttggcttgatcaaaaatcatgagaaacttggctactgaaattgtgtattcaaacctagcaaagaaactagatctgtttatctgagtcatatttttttttctcctctgaagcagttgaattgtgtgaggccaagtatggtgctgtcattatgaaactataatgggagttagaattttctgagctctcaccactgaattgaagtactaacttttgcaaatgtttacgtaataaatgtggtgtatttttctttaccttcctcaacattgaatttttggcctgggtttgaacacattttgatgaacgcacctacagttaagaacgtacccctgagtgacccttgttcttactcagaaacttcttaggtacatagtatggtacagaatgtattgactccatgttgtctttgaatttttttctagaagttacatgcatggatgagtcatttcttcaatgagaaatgtattctcaaacataaaagactatttctcttgatagtctccaaaagactatttctcttgatattctccatttgatattaagtacatttggtgcttaatgaatgcttattggattgatgaattgataacctccagagaggtcaaattaaggatttaaatgagtctgcctgaagtatgatactcatctttaaggcataatctgtatatgtacctaattcatagatgggtcagtgatttctgaaagccatatcatgtgaagtcattctgtttactgtcagcttggtgactgcgggtacagacctggatccacagccatgccttcctattatccagtcttagattcttttagactcttcttggcctattgccaaagcttacctttcagttgttccccacatgctccttgcagttcagaagaccctagggctcagatggacatttgtcaggctgcctgttgcttactctgtacttgccgcagggtaggaaacaaagtggttgcttgttcctggaaattctttatactaggtatcatcttaagaatttgcctggcttgccttctgcaagttgcccaaccctgaaggtggggctttggtattgtaaaatgttgcctgaattctgcctctgatgttagttgactactttcacctttccagatcttggtatcttcatccaacttaccttctaactttgatcctctggtgtttgctgataattttcgagtttttagaattcttagttcttgtttcttcttaatctctggccattggcttttatgcctaccatatggcttttcaatcctcttattgggaatctcaactttctaacttaaaggccaggtgcagtggccctttggatacccctccaggaaaggcattcccctgtgatatgctgacctaggtcaaagtaatttactagctctgcagaaagtagttttgggaattactttaaccttcaatggccagaggacactgctcattattgaaaacttattataaatattcattagaatgtcagttactataatgagacatcaatttgttgagtgacttgagtcacccaaagggacaaaagcagcttctcactttcaatgaatttaaaccgttcactttcaactcagacacatcatagacacactgggtttttccttggcagtactactaattcctagtgagattcatcttgctttgttttaaaaaaattttatttttgttttactttgtcttacagaccccctgtgaattgggcagtcctgtcatttgtggcctcttgtagtcaattcggttacccaataaaaactaccacttatctgcatctcaaacctgggtctttgtactctcttaccaaaagagtataaatacaagtttgtctatatttcgtagaataacatagtatttttactctgggctcatcttttcctgctgttggtatttaagcaacaagtaccttgctgagttgggcatctaggccattatggatccctggagtttagctgtttcctgggtaattttctgagatcctatttttggctggtctgcagcgtgccttgatgtaagttgctgttttccggaacttcctgagggcctgatatgctactgtaggcagttctgggttgagtgggtttctaggctgagcgggtttctgggagcagctgcagattctatctcagttcttgacctgatgttgacatttgagtaaataaagagctccctttggtcaagctgtcacaggccagcacctgtcactgtctttcaattctccattcatgcagctgtgctggtaaagctgcccgttttcctaaagaaatctttttaaaaaacattatgttccccactgcagatcataatgtgaggaatgtagatagtgtgtgtacaggtagtgtctgctttttataataatccagtagattcttgaagaccacgtacttaagtagattaccttgcatatgccctgtgtattgctgctgttcccaggaaacaagtgggtaaggctggcatggggagaagggcaaaggaggaatggtccagaaattacatatcattagctgacattcactgttgaaggggtggagatgacacagacacatagggtaggtacttcctgcacacatatgcacacatactcaatgcacatgggtgctgtaggttctgcgtggtgtttgttcccagccatgcatctgtcattttcatcccactgctgtgtttagagttagggtgataataagtaagtctgccatctgacaatcacttgaggataagcatgggagctgactgcaacagacctttcattattttatgtgcaatgtaaagaacctgagaatcaagacacctttattgctgtggcctctctaccagctatgatttggtttgggtgtccggaggcagaggctgacacttggaggtttggcaaagggagtcctcagggttggagtaagtactaaaaatgcttcccaggttatcagctgttttctacactcatctggggacagacatttcctcggcctcacccctgccctgctgtgatcttgtgctcaagacagctctagtctttcatttacagaaaggatgtagaaccaaaacaattcttcattgcattgtaggatgtttagcagcatctctgacctctacccagtagatgccagtagcatccctccccgttgtgatgatccaaaatgtttttagacttcactaaatgtctcctgggacagggattaagggagcttgaggtgtcaaggatgaggttaggaggtctgtcttgggcagctgtatatatggtagtgtcattcactcagatgagaaacactggtaaaaaaaaaacagcatttgggggaaatcttgagttttattttagacatgttgagtttagagtggctttgaggtttagtccagagatataaatttgggtgagtaggtggtaattgaagctgtgaatgtggataagattgcctagggaaagaggatagagaagaaggcctaggaccaagcagtgagaaattctaacggctggttagagaaggatgagcttgcaaaggaggcagggaaggagtgacaagacaggtaggataaaaactgggatgtcatagatggcaaagagaaatagtatcacaaaaagaagagagttatcaatagtatagaatactgctgagagttgaagaagatgaggacttaaaacatgttagctgtgtttagtaacatggaagtcagcgtttttcaaacctttctttagcacttactcatgcccctttgacaaggaaggtgtgaagtgctcaggcaggagtgtatggaaacaaaaccagggctgaaatcattcacttatttattcattcaggtatcatgtcattcatgtacagcattatctacttaggtatcagcctgtgtgccaggaactaggcacttttttcataatagagaattctgaatccagaaatctgatggctttctgtttttagatgttttctgggtcatttgttaagaaatgtagaattttactatcacattgattcagaaatgatgttcctaacccttagtcaaaaattttgctaagattcatggtgggtgaaactattgcccttacttccctcacttctggtggaaattcatcctgatggagccaagcctatgaaagagagatgagtgtagaaatacatacccataaagacataggaatgtactagttgtctagaactgtaaattgccattagtttggactccacctttacaaatttgtgattattacagactctggaggagttgaaagtcctcttcggttaattatggaaaaacagcttgttaagcaaatgctaatgtaagaagatcacaatgtgggtaggcttaacctagtcaaaggaggaagggccttcaagtgtatttacatatcaacagtggatatgttaattagtgtgcatttttaattcaggtcagatgacagcattgagagtaacagggatgcatttctctaaaatactttctttgagatttttcaagttcaatgtgaagagtcagtagttgggtgtgattagtcattacccaagtccaaggtgctcaaaaaaggttagtgttttagtgtctctgtcatttgacagttaatattatgaatagttgtgcccacagtcttagaactccttccatgacattgtccctccatactgacacttctctttcctgcaggtgaggagtaagaggagcaggctcctgcacagtgactacatgaacatgactccccgccgccccgggcccacccgcaagcattaccagccctatgccccaccacgcgacttcgcagcctatcgctcctgacacggacgcctatccagaagccagccggctggcagcccccatctgctcaatatcactgctctggataggaaatgaccgccatctccagccggccacctcaggcccctgttgggccaccaatgccaatttttctcgagtgactagaccaaatatcaagatcattttgagactctgaaatgaagtaaaagagatttcctgtgacaggccaagtcttacagtgccatggcccacattccaacttaccatgtacttagtgacttgactgagaagttagggtagaaaacaaaaagggagtggattctgggagcctcttccctttctcactcacctgcacatctcagtcaagcaaagtgtggtatccacagacattttagttgcagaagaaaggctaggaaatcattccttttggttaaatgggtgtttaatcttttggttagtgggttaaacggggtaagttagagtagggggagggataggaagacatatttaaaaaccattaaaacactgtctcccactcatgaaatgagccacgtagttcctatttaatgctgttttcctttagtttagaaatacatagacattgtcttttatgaattctgatcatatttagtcattttgaccaaatgagggatttggtcaaatgagggattccctcaaagcaatatcaggtaaaccaagttgctttcctcactccctgtcatgagacttcagtgttaatgttcacaatatactttcgaaagaataaaatagttctcctacatgaagaaagaatatgtcaggaaataaggtcactttatgtcaaaattatttgagtactatgggacctggcgcagtggctcatgcttgtaatcccagcactttgggaggccgaggtgggcagatcacttgagatcaggaccagcctggtcaagatggtgaaactccgtctgtactaaaaatacaaaatttagcttggcctggtggcaggcacctgtaatcccagctgcccaggaggctgaggcatgagaatcgcttgaacctggcaggcggaggttgcagtgagccgagatagtgccacagctctccagcctgggcgacagagtgagactccatctcaaacaacaacaacaacaacaacaacaacaacaaaccacaaaattatttgagtactgtgaaggattatttgtctaacagttcattccaatcagaccaggtaggagctttcctgtttcatatgtttcagggttgcacagttggtctctttaatgtcggtgtggagatccaaagtgggttgtggaaagagcgtccataggagaagtgagaatactgtgaaaaagggatgttagcattcattagagtatgaggatgagtcccaagaaggttctttggaaggaggacgaatagaatggagtaatgaaattcttgccatgtgctgaggagatagccagcattaggtgacaatcttccagaagtggtcaggcagaaggtgccctggtgagagctcctttacagggactttatgtggtttagggctcagagctccaaaactctgggctcagctgctcctgtaccttggaggtccattcacatgggaaagtattttggaatgtgtcttttgaagagagcatcagagttcttaagggactgggtaaggcctgaccctgaaatgaccatggatatttttctacctacagtttgagtcaactagaatatgcctggggaccttgaagaatggcccttcagtggccctcaccatttgttcatgcttcagttaattcaggtgttgaaggagcttaggttttagaggcacgtagacttggttcaagtctcgttagtagttgaatagcctcaggcaagtcactgcccacctaagatgatggttcttcaactataaaatggagataatggttacaaatgtctcttcctatagtataatctccataagggcatggcccaagtctgtctttgactctgcctatccctgacatttagtagcatgcccgacatacaatgttagctattggtattattgccatatagataaattatgtataaaaattaaactgggcaatagcctaagaaggggggaatattgtaacacaaatttaaacccactacgcagggatgaggtgctataatatgaggaccttttaacttccatcattttcctgtttcttgaaatagtttatcttgtaatgaaatataaggcacctcccacttttatgtatagaaagaggtcttttaatttttttttaatgtgagaaggaagggaggagtaggaatcttgagattccagatcgaaaatactgtactttggttgatttttaagtgggcttccattccatggatttaatcagtcccaagaagatcaaactcagcagtacttgggtgctgaagaactgttggatttaccctggcacgtgtgccacttgccagcttcttgggcacacagagttcttcaatccaagttatcagattgtatttgaaaatgacagagctggagagttttttgaaatggcagtggcaaataaataaatacttttttttaaatggaaagacttgatctatggtaataaatgattttgttttctgactggaaaaataggcctactaaagatgaatcacacttgagatgtttcttactcactctgcacagaaacaaagaagaaatgttatacagggaagtccgttttcactattagtatgaaccaagaaatggttcaaaaacagtggtaggagcaatgctttcatagtttcagatatggtagttatgaagaaaacaatgtcatttgctgctattattgtaagagtcttataattaatggtactcctataatttttgattgtgagctcacctatttgggttaagcatgccaatttaaagagaccaagtgtatgtacattatgttctacatattcagtgataaaattactaaactactatatgtctgctttaaatttgtactttaatattgtcttttggtattaagaaagatatgctttcagaatagatatgcttcgctttggcaaggaatttggatagaacttgctatttaaaagaggtgtggggtaaatccttgtataaatctccagtttagccttttttgaaaaagctagactttcaaatactaatttcacttcaagcagggtacgtttctggtttgtttgcttgacttcagtcacaatttcttatcagaccaatggctgacctctttgagatgtcaggctaggcttacctatgtgttctgtgtcatgtgaatgctgagaagtttgacagagatccaacttcagccttgaccccatcagtccctcgggttaactaactgagccaccggtcctcatggctattttaatgagggtattgatggttaaatgcatgtctgatcccttatcccagccatttgcactgccagctgggaactataccagacctggatactgatcccaaagtgttaaattcaactacatgctggagattagagatggtgccaataaaggacccagaaccaggatcttgattgctatagacttattaataatccaggtcaaagagagtgacacacactctctcaagacctggggtgagggagtctgtgttatctgcaaggccatttgaggctcagaaagtctctctttcctatagatatatgcatactttctgacatataggaatgtatcaggaatactcaaccatcacaggcatgttcctacctcagggcctttacatgtcctgtttactctgtctagaatgtccttctgtagatgacctggcttgcctcgtcacccttcaggtccttgctcaagtgtcatcttctcccctagttaaactaccccacaccctgtctgctttccttgcttatttttctccatagcattttaccatctcttacattagacatttttcttatttatttgtagtttataagcttcatgaggcaagtaactttgctttgtttcttgctgtatctccagtgcccagagcagtgcctggtatataataaatatttattgactgagtgaatgagttttacatggccttatgaattaacggtgagtctaaatgttataatcatactttgagagggagaaagccagttctattttctactttcctcttaagaagttcaaaaattcattttattaaaaaaacaggaggtaaaatatatacacagccaaatctagtgaaagaaaatctgatgaatataagttcatttacgttttagaaatttttgtgcagtgaggaaaaccagtactgttagaaaagtcatgccaactcagccactgtcaggagtaagttgattttccattgaagtccccaaattccctcttaatggagtattggctatatcttaaacatatctttagtttaagacttctgaaaatgttgtctttgtctaaaatgttaaaatcccatcctactactgacctgctactcttttttctggggtgattttacccccaacaaattctataaatgccttctctggctctgattcaaaaagtgctcacaaatggaaatgctggggacagaaaatttcaacttcttcacctgtcatactcatatcatagctgaacactctaatagcacacacacacacacacacacacacacacagacacacacacacacacacacacccctatcatcttctgggtaggggaagggaaaggcgcttgaacaacagacacaagagctggtctaataattcatgtagcaccttctgtttccttcgttgaaattttactctgaaggtgactcagagtcaattaaattggtgtgcaatgagttcatctctaaactgattcttttctttggtgaaatgaagcttattaaacttaataaaggtaattaaacttgaaaaagatgagcttatatgtctcttactactccaagaaagactgaactcagctggttactcatggatagttcaataagacaaatcaaatcaattggaaaggaacgagatgggtaaaaaaaaaaaagccgttaaatgaatctgctcaataagcactcctttaccatgctaataaaaataatgtaacccagttctgtaaaaaggttctagtactttgaaactcaagttcaaaacaaaataaaatgcaaacttcgcttcacctaacacctcccacaacattctagctacccaactgggtgaatattgtaattgcccacaaccccgaattcactttttccctccagtatgataaaacagattgattcccttttaaagcaataccctttcttctctcccatcttgtcggtatcagagataatggataggtgagaaaaaattaaagaagcttctggattcattgtaatggggacctaaccatcacactatgcagcagcaaatgggatggtctggaaagcagaccagaaccttgtctggtaactttgcttctaatgtctgtctgtgtttcctaaactgaggcctaactcttgactttttgacagtggtgctcataagaaagtttggggctgggcacggtcactcatgcctgtaatgtcagcactttgggaggctaatgcaggaggatcacttgagtctaggagttcaagaccagcttgaacaacatagggagaccctgtctgtattaaaaaaaaaaattagccagacgtgatggtgcaggcctgtagtcccagctacttaggaggctgaggctgcagtgatctgggatcataccccttcaagaacacatgtgaatggtggggcctctcagctttctctgatttggcaacccagaagaaatatgtgctttctctttgaagattcacaggatcctagcacttggaaacctaggccactgtccagagcagaaggtcacacaatttctcagtgtgacttttgttcatttcagggtgttgacactgggcccaacacttgaaaattgcttgagatgataaattgcttgaggtgatcaaagaatatatcagctcttcaaagctgacctcattcttggtgcaactctcagggccagaatgtgtgcttcccgaagctcattttcctatctgatttgcctgttgaaactctgtgaaagacccttgaatgctaggaatttgaagggacaaaaagttgaagaaaggtgaatggatttcagggtggaagtggactggattttactctcacttcatcaggcagagctatctcagtgataaattgaaactctcctctggctccaaagaacaaatcatgagctgggtggaaatgtcagttgagaagaagagcagcaaacagctttgttttcctatagttgtggttttacatggtgatgatgacacacgaagatgaaaatgtgcagcatgaactccagttgttatctgagtgagcatctctgccaacactgaaggatatgtgtgggtgtcacctgaaaacaaagagaaagacagagagagaaaaagaagaaaaggaggccctgtttcggaaagaagagccagttaatcaaagatcagcagtgacaagtggcgctgtttatttcatgagctttatatgtgatttccttccccttgctaatctcgtctgaatttattctctggactaaatatatttgcatctggtgactgaggaaggggtggaaaaggtgaccttgaatgggcatcagggtagttaccatagttatttagtcatttcttcagtctcttgggcacacacttagcttcccaaatggaggtttctgctaacttttgagaacctgtgacatattacacagggaagacaaacttcaggtggttgttggggaccctcttttatccccaaccctatgcaatgcttgtttcatttgctttatgtttctccttcctctcttctacttcattcattctagaactagttaatgggcacctgcccagcactaagatgtgggctaggtacagggatgtggcagtgtgcagcacagatattacctccacacttccgaagtgtagagtgtctgctttgtatattacttcagttttttttttcttttcctgccccctatatcctgcttctaggggtaaccacttagtcttgattttggggcttagatcttaatgtggctacttgatagcctttgttggtttgcctgaaattcatttctttgacatgttcctatttaacatctctaactctttcaatgtcatagatcaggaatcagcaaatttttttctgttaagggccagatagtaaatattttaggctttgtgactatactgtctcttatagataataagttttgccactgtagtgtgaaagcagccataaacaatatataaacaaataagcatggctgcattccaataaacctttatttatggatattgatatgtgaagttcgtgtgattttcatgtcatgcaatattacttttcctttgtttttttcccccaaccatttatagatggaaaatccatttttagttcatgggctgtacaaaggcaggtagtgggctggacatggcttatgggctacggtttgctgatccttgacttagatctaagctgcaaccttagctataggcttatttttgagttccagccaccttctacatttttagggccagaaggaattggtttgaatgtgtgtaaaggcttcttgggagtgctgagagtcaagcatctcttttgaaagaaggacatggatcaataaagaagaaggaagagctttcatctaaggaaagccatttgaggtagaagaaatgggaagttataagcaaagggaatgagaagctgtttcaggaagacagagtcttctgtatattattattattaattttgacagagtcttgctctgtcacccaggctggagtacagtagcatgatctcagctcactacatcctctgcctctcggggtcaagcgattctcatgcctcagtctcctcagtagctgggatgataggcacacgccaccactcccggctaatttttttattttttatttttatttttagtagagatggggtttcaccatgttggccaggctggtctcgaacgcctggcctcaagtgatccacccaccacggcctcccaaagtgttgggattacaggcatgagccactgtgcctggcctatattattgatgaaagcctaaacatcttgggagctcttgttactcttttctcaagtcctttctactcttttccctcttttctaggcatcacatccttgtaatctccaaggaaacaaatttctttctttcttttttttttttttgagatggagtctcgatctatcgcccaggctggagtgcagtggcactatctccgctcactgcaagctctgcctcctggttcatgccattctcctgcctcagcctcccgagtagatgggactacaggcatccgccacccaccaccacgcctggctaattttttgtatttttagtagagacagggtttcaccatgttagccaggatggtctcgatctcctgacctcgtgatccgcccaccttggcctcccaaagtgctgggattataggcatgagccaccgcgcccggccaggaaacaaatgcacagaaggaagggggcagaaaatggtctgtgtccaatgtgatgaacaggcttgacttccctgctaattcttccctaagtagtacatccaaatccaactctgggtgggtagagatcagaagcagctgtctcagaattggcctcctactttctacctatctcatgtttccagtctgcatttggctgccatttatgagtggccaagagtaacccctcatgaatctacattaaggctcagcatttcacaagtagctgatgaaatcagtattactcagatcagaaaggcaccgacctaacccttaccatcccttgcccccattcctcactccagtcttgttatacccaaggtacaaatcgttcctggaagcagcccagcatatgggggcaccctaagccacacacccagtcacaccatctgggcaatttaaaaatagggccaaatggagcatttagactggtctgtccagccaagatcaggaaattgcctctaaaaggtcagatgattaagattattgtaccaacagtctaggatgtcagtaatgaaaaaaagcttctggcagaatgaattttcctgactttacacatggtgttccagttctgagttggggtgaacagctttgggaaatcccaagatttttctactccagaaaatagtgctactatgtacatttatgcactgtgtgccttgcacaaaggcccctagtgaagggaatgaagagggctgaaatctagtcaagctccccttatcaagctctgcacctgcttaatgaaggagagggcgccttctctaatgcccgcatgtatgggctattgaggccctgatagaatgctagcctttctgccatttggttactgagctttatagaaattatatccccattctcaaagcaggaattttctaggatgagtaatagttaaaacaaaataaaactacccctcccccacaaaatggaatggttctaaatatcacaaaaatttatctcctcggtcccttctttagtcttcccttcaccttagctctgcatgttttaatttagttggttggtttttcttgacttacactgggtgggtatgtctttggagagtaatgagagaagaaacttcctagttcgtgtcctagtttggctcttagaagaaaaacaaaaaatgtttttgtgacctgaggaatactaggtaatatagcttggatatttgtcctctccaaatctcattttgaaatttgatccccagtgttggagatggggtctagtgggaggtgtttgggtcttaggggcggatccctcatgaatggcttggtgccattcgtatgggattgagttcttgctcttagttttggggagatctggttgtcaaaaagagtctggcatcctattcagtgcctcccttctcccctgcctatttctctctctttctcactctttctctctctctatctctcacttcctgccatgtgatctttacataccagctccccttcccccttctgccatgactggaagcttcctgaagtccctgctagaagcagaatagagtgctatacttcttgtacagcctgcagaactatgttccaaataaacctctttttgttataaattacccagcctcaggtattcctttatagcaatgcaaatggactaagacactgggtttggggttagttttggggatgtacctagaactcttcagttaatgtagtctactcttatttcttagttatcagtacatgaggggaccagactaaataacctcagagctcattcctataattgttttcatactccatattataactctcctagaattatcttcccatcatgaataccattgttttgggtttctccactatcacatttctaagtcttacagatataaatattttatgtttgagatttgtcaaccaggattgtttgaataaatgtataattctctacaactgttaagtttactaatttatcaaaattgtttccatcactttttctggagaaaataatgaattctaaagtttagtttaaagttaaaataatgaattttaaagtttaatgaagtttaaggtttaaaaaatgatgtaatagtttactatgtaaatactatgtaaactattacatcattttttaaagcttgtcattttccaaataaacttcttatacattattgaagtcttcatagtgaactacatcttgcatgtgatgggtgctcagaatatcttaatgagtgaatcaatggatggatggataaatgaatgactatctttcatttgataaatatccgcaagctattttggtttttgacaaattagatgaaacaggtattatgaaaagacttgggaaaattgaggacaaattagttaactagatactatgaaaagacttgggaaattcatatttttaaaattattgaaatgtattaattaatatgcattttaagacattgtttaggcattcagaagcaaaaactgtttatccttccttggcaacaaacagaactctaattgtgttcagttatctactctccatgtgctctggggagttccagggagtggataaggattagtttaagccagaatggtagtcctaaccttctcatcagtgattggtttaggcatggacacatgataaaattctgaccaatagcctgacgggtctctgataaagtttctttttgctcttttttttattttgagacagtctcactctgttgcccaggctggagtgcagtggtgccatcttggctaactgcaacctcactgcaacctccagcttcctgggttcaagcaattcttgtgcctcagtctcctgagtagctgggactacaggcatgtaccaccatgcctggctaatttttgtatttttagtagagacaggatttcaccatgttcgccaggctggtcccgaactcctgacctcaagtgatctacttgcctcggcctccaaagtgctgggattacaggtgtgagccaccgtgctcagcctctccttgctctttaaaaagagatgtttggaaacaaagtttcctttctgctatagaatgttatgtctgcaagcagcatctgatatagcctctttgcgaccaggggaggaattggcctgagaacatgctaaggcaggaagagcagaaagaggggaggaacctggatcttggtgacattattgagctgcagattgagccgacttgaattctccttgcttccttccttccttccttccttccttccttcctcccttccttccttccagttcttgtcatgtgagacagtaaataactttattgtttaagcccttttgggttagattttctattacatgaagtttaaagcattctgataacttcatgtttattgatgtgtataaatactaatatattctattatttgggggatacaaagaatttgactcaatagtatcttgttctattgacatgttcaattattaatcactgataaccctgaataactaaatgttattaccacatttaggacaatatccacgtccactgacatatgaaatttgggcaatttgcttctttgggaagcattataaatcacagaacagcagaggatacaaagacccccacaagagatcatcaagattttcttcttcccttctttttgtcatacacattgctgagaaggagcacctccaggaaggaaccaaattatttgtatttttctgttatttttagttttgagacccggtctcactctgtcacccaggccagagtgcagtggtacagtggctcactgcaacctctgcctcccaggttcaagcaattctcctgcatcagcctcccaagtagctgggattacaggtgcccaccagcacgcccagctaatttttgtatgttttcagtagagatggggtttcatcatgtggccgggctggtctcgaactcctgacctcaagtgatctgcccgcctcagccttccaaagtgctgagtttacaggcatgagccaccaagtccagccagtatttgtattttgaattaaagtatgtatgtgaaaaatgagaacactggctcacttcctggtaatataaaatacaacatatcagtaaaatcttccatgattctcctagttcagtgatctctttctacccctgtgttacctaatgctggcctaaactccagcggcctgtagaggagattggtttttgtagttgtaaaataatattttaggctgggtgtggtgcctcatgcctgtaatcccagtactttgggaggctgaggcgggcagatcacgaggtcaggagatggaggccaacatggtgaaaccctgtctctactaaaaatacaaaaattagctgggcgtgatggtgcgtgcctgtaatcccagctacttgggaggctgaggcaggagaatcgcttgaacctgggaggcggaggttgcagtgagccgagatggcgccactgcactccagcctgggcaacagagcgagactctgtctcaaaaaaaaaaaagtcacgt

SEQ ID NO: 244 - DNA, 1141 bp, Homo sapiens
ttctttcttcctttcttttttctctctccccttccttccttctttccttcttttcttttcttttcttttcttttctttctctctttctttctgtctttcttttctcattctgttgccctggctggagtgcagtggcatgatctcggctcatagcagcctccacctcctgggttcaagcgattctcctgccttagcctccctagtagctgggattacaggtacccaccatgatgcctggctaattttttgtattttcaatggagacggggtttcaccatgttggccaggctcgtcttgacctcctggcctcaaatgatccacccactttggcctcccaaattgctggcattacaggcgtgagccactgcacccggcctgttccttcttaagaacactttgtctcccctttaatctctgctggatttcaagcaccccttttacacaactcttgatatccatcaataaagaataattcccataagcccatcatgtagtgaccgactatttttcagtgacaaaaaaaaagtctttaaaaatagaagtaaaagtctaaagtcatcaaaacaacgttatatcctgtgtgaaatgctgcagtcaggatgccttgtggtttgagtgccttgatcatgtgccctaaggggatggtggcggtggtggtggccgtggatgacggagactctcaggccttggcaggtgcgtctttcagttcccctcacacttcgggttcctcggggaggaggggctggaaccctagcccatcgtcaggacaaagatgctcaggctgctcttggctctcaacttattcccttcaattcaagtaacaggaaacaagattttggtgaagcagtcgcccatgcttgtagcgtacgacaatgcggtcaaccttagctggaaacacctttgtccaagtcccctatttcccggaccttctaagcccttttgggtgctggtggtggttggtggagtcctggcttgctatagcttgctagtaacagtggcctttattattttctgggtgaggagtaagaggagcaggctcctgcacagtgactacatgaacatgactccccgccgccccgggcccacccgcaagcattaccagccctatgccccaccacgcgacttcgcagcctatcgctcc

SEQ ID NO: 245 - protein, 121 aa, Homo sapiens
MLRLLLALNLFPSIQVTGNKILVKQSPMLVAYDNAVNLSWKHLCPSPLFPGPSKPFWVLVVVGGVLACLLVTVAFIIFWVRSKRSRLLHSDYMNMTPRRPGPTRKHYQPYAPPRDFAAYRS

SEQ ID NO: 246 - DNA, 1075 bp, Homo sapiens
ttctttcttcctttcttttttctctctccccttccttccttctttccttcttttcttttcttttcttttcttttctttctctctttctttctgtctttcttttctcattctgttgccctggctggagtgcagtggcatgatctcggctcatagcagcctccacctcctgggttcaagcgattctcctgccttagcctccctagtagctgggattacaggtacccaccatgatgcctggctaattttttgtattttcaatggagacggggtttcaccatgttggccaggctcgtcttgacctcctggcctcaaatgatccacccactttggcctcccaaattgctggcattacaggcgtgagccactgcacccggcctgttccttcttaagaacactttgtctcccctttaatctctgctggatttcaagcaccccttttacacaactcttgatatccatcaataaagaataattcccataagcccatcatgtagtgaccgactatttttcagtgacaaaaaaaaagtctttaaaaatagaagtaaaagtctaaagtcatcaaaacaacgttatatcctgtgtgaaatgctgcagtcaggatgccttgtggtttgagtgccttgatcatgtgccctaaggggatggtggcggtggtggtggccgtggatgacggagactctcaggccttggcaggtgcgtctttcagttcccctcacacttcgggttcctcggggaggaggggctggaaccctagcccatcgtcaggacaaagatgctcaggctgctcttggctctcaacttattcccttcaattcaagtaacagggaaacacctttgtccaagtcccctatttcccggaccttctaagcccttttgggtgctggtggtggttggtggagtcctggcttgctatagcttgctagtaacagtggcctttattattttctgggtgaggagtaagaggagcaggctcctgcacagtgactacatgaacatgactccccgccgccccgggcccacccgcaagcattaccagccctatgccccaccacgcgacttcgcagcctatcgctcc

SEQ ID NO: 247 - protein, 99 aa, Homo sapiens
MLRLLLALNLFPSIQVTGKHLCPSPLFPGPSKPFWVLVVVGGVLACLLVTVAFIIFWVRSKRSRLLHSDYMNMTPRRPGPTRKHYQPYAPPRDFAAYRS

SEQ ID NO: 248 - DNA, 4104 bp, Homo sapiens
ttctttcttcctttcttttttctctctccccttccttccttctttccttcttttcttttcttttcttttcttttctttctctctttctttctgtctttcttttctcattctgttgccctggctggagtgcagtggcatgatctcggctcatagcagcctccacctcctgggttcaagcgattctcctgccttagcctccctagtagctgggattacaggtacccaccatgatgcctggctaattttttgtattttcaatggagacggggtttcaccatgttggccaggctcgtcttgacctcctggcctcaaatgatccacccactttggcctcccaaattgctggcattacaggcgtgagccactgcacccggcctgttccttcttaagaacactttgtctcccctttaatctctgctggatttcaagcaccccttttacacaactcttgatatccatcaataaagaataattcccataagcccatcatgtagtgaccgactatttttcagtgacaaaaaaaaagtctttaaaaatagaagtaaaagtctaaagtcatcaaaacaacgttatatcctgtgtgaaatgctgcagtcaggatgccttgtggtttgagtgccttgatcatgtgccctaaggggatggtggcggtggtggtggccgtggatgacggagactctcaggccttggcaggtgcgtctttcagttcccctcacacttcgggttcctcggggaggaggggctggaaccctagcccatcgtcaggacaaagatgctcaggctgctcttggctctcaacttattcccttcaattcaagtaacaggaaacaagattttggtgaagcagtcgcccatgcttgtagcgtacgacaatgcggtcaaccttagctacaatgagaagagcaatggaaccattatccatgtgaaagggaaacacctttgtccaagtcccctatttcccggaccttctaagcccttttgggtgctggtggtggttggtggagtcctggcttgctatagcttgctagtaacagtggcctttattattttctgggtgaggagtaagaggagcaggctcctgcacagtgactacatgaacatgactccccgccgccccgggcccacccgcaagcattaccagccctatgccccaccacgcgacttcgcagcctatcgctcctgacacggacgcctatccagaagccagccggctggcagcccccatctgctcaatatcactgctctggataggaaatgaccgccatctccagccggccacctcaggcccctgttgggccaccaatgccaatttttctcgagtgactagaccaaatatcaagatcattttgagactctgaaatgaagtaaaagagatttcctgtgacaggccaagtcttacagtgccatggcccacattccaacttaccatgtacttagtgacttgactgagaagttagggtagaaaacaaaaagggagtggattctgggagcctcttccctttctcactcacctgcacatctcagtcaagcaaagtgtggtatccacagacattttagttgcagaagaaaggctaggaaatcattccttttggttaaatgggtgtttaatcttttggttagtgggttaaacggggtaagttagagtagggggagggataggaagacatatttaaaaaccattaaaacactgtctcccactcatgaaatgagccacgtagttcctatttaatgctgttttcctttagtttagaaatacatagacattgtcttttatgaattctgatcatatttagtcattttgaccaaatgagggatttggtcaaatgagggattccctcaaagcaatatcaggtaaaccaagttgctttcctcactccctgtcatgagacttcagtgttaatgttcacaatatactttcgaaagaataaaatagttctcctacatgaagaaagaatatgtcaggaaataaggtcactttatgtcaaaattatttgagtactatgggacctggcgcagtggctcatgcttgtaatcccagcactttgggaggccgaggtgggcagatcacttgagatcaggaccagcctggtcaagatggtgaaactccgtctgtactaaaaatacaaaatttagcttggcctggtggcaggcacctgtaatcccagctgcccaggaggctgaggcatgagaatcgcttgaacctggcaggcggaggttgcagtgagccgagatagtgccacagctctccagcctgggcgacagagtgagactccatctcaaacaacaacaacaacaacaacaacaacaacaaaccacaaaattatttgagtactgtgaaggattatttgtctaacagttcattccaatcagaccaggtaggagctttcctgtttcatatgtttcagggttgcacagttggtctctttaatgtcggtgtggagatccaaagtgggttgtggaaagagcgtccataggagaagtgagaatactgtgaaaaagggatgttagcattcattagagtatgaggatgagtcccaagaaggttctttggaaggaggacgaatagaatggagtaatgaaattcttgccatgtgctgaggagatagccagcattaggtgacaatcttccagaagtggtcaggcagaaggtgccctggtgagagctcctttacagggactttatgtggtttagggctcagagctccaaaactctgggctcagctgctcctgtaccttggaggtccattcacatgggaaagtattttggaatgtgtcttttgaagagagcatcagagttcttaagggactgggtaaggcctgaccctgaaatgaccatggatatttttctacctacagtttgagtcaactagaatatgcctggggaccttgaagaatggcccttcagtggccctcaccatttgttcatgcttcagttaattcaggtgttgaaggagcttaggttttagaggcacgtagacttggttcaagtctcgttagtagttgaatagcctcaggcaagtcactgcccacctaagatgatggttcttcaactataaaatggagataatggttacaaatgtctcttcctatagtataatctccataagggcatggcccaagtctgtctttgactctgcctatccctgacatttagtagcatgcccgacatacaatgttagctattggtattattgccatatagataaattatgtataaaaattaaactgggcaatagcctaagaaggggggaatattgtaacacaaatttaaacccactacgcagggatgaggtgctataatatgaggaccttttaacttccatcattttcctgtttcttgaaatagtttatcttgtaatgaaatataaggcacctcccacttttatgtatagaaagaggtcttttaatttttttttaatgtgagaaggaagggaggagtaggaatcttgagattccagatcgaaaatactgtactttggttgatttttaagtgggcttccattccatggatttaatcagtcccaagaagatcaaactcagcagtacttgggtgctgaagaactgttggatttaccctggcacgtgtgccacttgccagcttcttgggcacacagagttcttcaatccaagttatcagattgtatttgaaaatgacagagctggagagttttttgaaatggcagtggcaaataaataaatacttttttttaaatggaaagacttgatctatggtaataaatgattttgttttctgactggaaaaataggcctactaaagatgaatcacacttgagatgtttcttactcactctgcacagaaacaaagaagaaatgttatacagggaagtccgttttcactattagtatgaaccaagaaatggttcaaaaacagtggtaggagcaatgctttcatagtttcagatatggtagttatgaagaaaacaatgtcatttgctgctattattgtaagagtcttataattaatggtactcctataatttttgattgtgagctcacctatttgggttaagcatgccaatttaaagagaccaagtgtatgtacattatgttctacatattcagtgataaaattactaaactact

SEQ ID NO: 249 - protein, 134 aa, Homo sapiens
MLRLLLALNLFPSIQVTGNKILVKQSPMLVAYDNAVNLSYNEKSNGTIIHVKGKHLCPSPLFPGPSKPFWVLVVVGGVLACLLVTVAFIIFWVRSKRSRLLHSDYMNMTPRRPGPTRKHYQPYAPPRDFAAYRS

SEQ ID NO: 250 - DNA, 4356 bp, Homo sapiens
ttctttcttcctttcttttttctctctccccttccttccttctttccttcttttcttttcttttcttttcttttctttctctctttctttctgtctttcttttctcattctgttgccctggctggagtgcagtggcatgatctcggctcatagcagcctccacctcctgggttcaagcgattctcctgccttagcctccctagtagctgggattacaggtacccaccatgatgcctggctaattttttgtattttcaatggagacggggtttcaccatgttggccaggctcgtcttgacctcctggcctcaaatgatccacccactttggcctcccaaattgctggcattacaggcgtgagccactgcacccggcctgttccttcttaagaacactttgtctcccctttaatctctgctggatttcaagcaccccttttacacaactcttgatatccatcaataaagaataattcccataagcccatcatgtagtgaccgactatttttcagtgacaaaaaaaaagtctttaaaaatagaagtaaaagtctaaagtcatcaaaacaacgttatatcctgtgtgaaatgctgcagtcaggatgccttgtggtttgagtgccttgatcatgtgccctaaggggatggtggcggtggtggtggccgtggatgacggagactctcaggccttggcaggtgcgtctttcagttcccctcacacttcgggttcctcggggaggaggggctggaaccctagcccatcgtcaggacaaagatgctcaggctgctcttggctctcaacttattcccttcaattcaagtaacaggaaacaagattttggtgaagcagtcgcccatgcttgtagcgtacgacaatgcggtcaaccttagctgcaagtattcctacaatctcttctcaagggagttccgggcatcccttcacaaaggactggatagtgctgtggaagtctgtgttgtatatgggaattactcccagcagcttcaggtttactcaaaaacggggttcaactgtgatgggaaattgggcaatgaatcagtgacattctacctccagaatttgtatgttaaccaaacagatatttacttctgcaaaattgaagttatgtatcctcctccttacctagacaatgagaagagcaatggaaccattatccatgtgaaagggaaacacctttgtccaagtcccctatttcccggaccttctaagcccttttgggtgctggtggtggttggtggagtcctggcttgctatagcttgctagtaacagtggcctttattattttctgggtgaggagtaagaggagcaggctcctgcacagtgactacatgaacatgactccccgccgccccgggcccacccgcaagcattaccagccctatgccccaccacgcgacttcgcagcctatcgctcctgacacggacgcctatccagaagccagccggctggcagcccccatctgctcaatatcactgctctggataggaaatgaccgccatctccagccggccacctcaggcccctgttgggccaccaatgccaatttttctcgagtgactagaccaaatatcaagatcattttgagactctgaaatgaagtaaaagagatttcctgtgacaggccaagtcttacagtgccatggcccacattccaacttaccatgtacttagtgacttgactgagaagttagggtagaaaacaaaaagggagtggattctgggagcctcttccctttctcactcacctgcacatctcagtcaagcaaagtgtggtatccacagacattttagttgcagaagaaaggctaggaaatcattccttttggttaaatgggtgtttaatcttttggttagtgggttaaacggggtaagttagagtagggggagggataggaagacatatttaaaaaccattaaaacactgtctcccactcatgaaatgagccacgtagttcctatttaatgctgttttcctttagtttagaaatacatagacattgtcttttatgaattctgatcatatttagtcattttgaccaaatgagggatttggtcaaatgagggattccctcaaagcaatatcaggtaaaccaagttgctttcctcactccctgtcatgagacttcagtgttaatgttcacaatatactttcgaaagaataaaatagttctcctacatgaagaaagaatatgtcaggaaataaggtcactttatgtcaaaattatttgagtactatgggacctggcgcagtggctcatgcttgtaatcccagcactttgggaggccgaggtgggcagatcacttgagatcaggaccagcctggtcaagatggtgaaactccgtctgtactaaaaatacaaaatttagcttggcctggtggcaggcacctgtaatcccagctgcccaggaggctgaggcatgagaatcgcttgaacctggcaggcggaggttgcagtgagccgagatagtgccacagctctccagcctgggcgacagagtgagactccatctcaaacaacaacaacaacaacaacaacaacaacaaaccacaaaattatttgagtactgtgaaggattatttgtctaacagttcattccaatcagaccaggtaggagctttcctgtttcatatgtttcagggttgcacagttggtctctttaatgtcggtgtggagatccaaagtgggttgtggaaagagcgtccataggagaagtgagaatactgtgaaaaagggatgttagcattcattagagtatgaggatgagtcccaagaaggttctttggaaggaggacgaatagaatggagtaatgaaattcttgccatgtgctgaggagatagccagcattaggtgacaatcttccagaagtggtcaggcagaaggtgccctggtgagagctcctttacagggactttatgtggtttagggctcagagctccaaaactctgggctcagctgctcctgtaccttggaggtccattcacatgggaaagtattttggaatgtgtcttttgaagagagcatcagagttcttaagggactgggtaaggcctgaccctgaaatgaccatggatatttttctacctacagtttgagtcaactagaatatgcctggggaccttgaagaatggcccttcagtggccctcaccatttgttcatgcttcagttaattcaggtgttgaaggagcttaggttttagaggcacgtagacttggttcaagtctcgttagtagttgaatagcctcaggcaagtcactgcccacctaagatgatggttcttcaactataaaatggagataatggttacaaatgtctcttcctatagtataatctccataagggcatggcccaagtctgtctttgactctgcctatccctgacatttagtagcatgcccgacatacaatgttagctattggtattattgccatatagataaattatgtataaaaattaaactgggcaatagcctaagaaggggggaatattgtaacacaaatttaaacccactacgcagggatgaggtgctataatatgaggaccttttaacttccatcattttcctgtttcttgaaatagtttatcttgtaatgaaatataaggcacctcccacttttatgtatagaaagaggtcttttaatttttttttaatgtgagaaggaagggaggagtaggaatcttgagattccagatcgaaaatactgtactttggttgatttttaagtgggcttccattccatggatttaatcagtcccaagaagatcaaactcagcagtacttgggtgctgaagaactgttggatttaccctggcacgtgtgccacttgccagcttcttgggcacacagagttcttcaatccaagttatcagattgtatttgaaaatgacagagctggagagttttttgaaatggcagtggcaaataaataaatacttttttttaaatggaaagacttgatctatggtaataaatgattttgttttctgactggaaaaataggcctactaaagatgaatcacacttgagatgtttcttactcactctgcacagaaacaaagaagaaatgttatacagggaagtccgttttcactattagtatgaaccaagaaatggttcaaaaacagtggtaggagcaatgctttcatagtttcagatatggtagttatgaagaaaacaatgtcatttgctgctattattgtaagagtcttataattaatggtactcctataatttttgattgtgagctcacctatttgggttaagcatgccaatttaaagagaccaagtgtatgtacattatgttctacatattcagtgataaaattactaaactact

SEQ ID NO: 251 - protein, 218 aa, Homo sapiens
MLRLLLALNLFPSIQVTGNKILVKQSPMLVAYDNAVNLSCKYSYNLFSREFRASLHKGLDSAVEVCVVYGNYSQQLQVYSKTGFNCDGKLGNESVTFYLQNLYVNQTDIYFCKIEVMYPPPYLDNEKSNGTIIHVKGKHLCPSPLFPGPSKPFWVLVVVGGVLACLLVTVAFIIFWVRSKRSRLLHSDYMNMTPRRPGPTRKHYQPYAPPRDFAAYRS

SEQ ID NO: 252 - DNA, 21749 bp, Mus musculus
  misc_feature (1)...(21749): n = A,T,C or G
ctcaacccccaccccatgtatcccttaaggccatgcccatgagactcagttcctctaatgacgtttcacctcctgaagactctataccctctcagaacagtgtccccaggaggaggttggcggacaccagctggatcagcacccatccctctctgtctcctgtctgagtaccctgtgagcaacagcctcaacttccagacgctgtgcctttccctccacagtggacggtgtccccgagctgtgaggcagaacaaaccctttctccttgagtcgggtgttctgtcccagcatcaggaagagcaagtggtacaactagaacatcagcatgaccacggtcctgtttccagcaccaaaaatacaaatatggctgccatgctccccgtgggtgggtgggtggggcgagaagccatatctcaggtctctgggtccttgggtgaggttgaaccccccataggaggataaagtccccgagtaacttccctctttcgccatgaaacccagatccactcatggggccttcttagtacttattgcttgaggccccatgcctatgacagtggcctctacctaaggttgatgagcaggccggtgcccattagcctagccccaggtgcttacttgactggctgactggggatgacagctagccaactgatacctagtgctgctggctgtcacacctgaggttcttctccccggacaagtaggcatcttggcccccatctccagtgttaggtgacagctgactgcccagacttgctaggcaagtcctggctcacttgtctcagtcccagcaaactcagctgcctctctgggctggagaggaatctggcatgactccctcactctgaagacagcagctgcagacttcacagagcttcccttccccatcctctgccctttggctctggtgcccattgggcttctgtgctgggccctgaacaactacaatggagaggcagcttcaaaggtctgcccaatgtgttggccatctgtatggcagggctacctttaactccagaatttcagctttccgatctgatctgggggacagggtaacaaaagcattgggggcagagaggtagaggcatctgggagatgggtccatgggtaaaacagcttgctatgcaagcacgaggacctgggtttaaatccccaggacttaagctgagcatggtagagtatctaccatccagctgtcccacagtgagataggaggcagaagtagaattcccagaagctcgaggggcagtgagcttagcattcacagaggcaaaacaagagaccaccccattctaccccaagccgtctcatattaagtggaagacaaagacctctgatctccatatacgcaaggctgacttcctggctatctgaatagcccaacctacaacagttgatgttttgacctcaggtccagagctcacccagccttattctcagctgagctcttcctctgtcacccctactccgacccaggcatgatttagcagccatagatttggaaagactggagccagatagaagtatacatcactccagagcctggagagctctgcctttcactcagaaagtcatcacaggcccaccaaacctgccaatgaggcctaagagtctctctcctgtgctgtttggatttttgtcaattagatacaagctagggtcatctaggaagagtgacacttccttgaaaagatgcccccatcacattggaccatcgtctagggagcgttttcttcatgattgatgtgggagggcccagccctttgtaggcagtgttatccctagccagatctgggcgaggtggcacatacctttggtctcagcactcggggaggtagaggcaggcagatctccatgagttcgaggccagcctgatctgcaaaggcttcctggacagccagggctacatagagaaaccctgtctgggtgggagatgcagggagcaaattgagcagggcgtggggttcaagctagcaagcattatttcttcacggtctctgtttcaatccctgccttcaggttcctgccttcccttcatgacaggctgtaagatgaaagaaacctgttttcttccccaggttgcttttggtcgccgtgcttatcccagccacggatgacaaagtaagccagaatccgcaaacggcctctgctctgcggcctgttgggattcactctttccttgattcgtttccagtctgatttctttgaccacccagacactgctgggctctagaccagtcgttctcaacctgtgggtcgtgacacctccagggggtcctgtatcagctatcctgcccatcagatgtttccattatcattcaaaacagtagccaagtcacaactgttttaaagggccacagcattcggaaggtcgagaaccgctgctctagacggagccctgaccagcaggctgactttttttcccaagtccgtgtggttctctctcacatgatgctctctttggctctgatgctgttcctaactgtcctgcctaggatgcagctacctccatccatctcctttagccccttggatctttccactttccccactctcccagcatggaagatccactcggctgttctccatgctgacatgcctaggcccaccctctacctccttctggaggccgtagtgtaagactacagagctttctttcctcaagcatcttcccgggatccttcctgcccgcctgcacccccccccccaatccctgagaagaacagagaatgacccatcagcaagccaatgggttaccccgagaatgtgacaaagggtgaggctgtgggtcccaagggtctgcagatagagggacgagccagcagccttgggtgcaagaccaggccttggagggtatctctaccttaccttataccacagagagaagtctggctcccatgttgccctgtggatgaaggtgggcaggctgagcacaagctttcaggaaccattgaattcattgtgaggctgagatggatctgcgtccataaggccaggaggggtaacagtgtcagaccccagccccagagggcgctctgcggttgattcagtagccaggagcatccagagagctcttctggggcccttgctttgtctcccactctgcaatccaggggagatctgcagccccttttccttggcaacactcaagacagaaagaggaagctacatgcccagccacccacggggaaggagattggttccactcctgcatgaggttgtcgacgaagtcattctgccttctagcaggacaatggagaattgaagaaagagggccgaagaaatggctcagccgttaagaacacttgctgctcttgcagaggacacaggttcagtatcccaggacccagatggtggcccacaaccgcctataactccagttccaggagatctgaccaccttcttctggcctcctcggccaccaagtaggcatgtgtacaggtacagttacaggcaaacactcacacactcaactagccagggagtctgctggctagtaaatcccaagtggccaagtggcctgcttctaaatccttccttgtagctgtctgatattcactccatcccaagtcttaaaaaataaataaataaaattgacgttattaccttcattttaatgcagagggaacagaaatcagatcagagaggttaagtaaccagcctgagatgccacagctgaggtcataaataaacatctctccccttcaatctctgactttgaacagccctcttaagagactgtagaacacagatgcttctccgtccaggaggaacgatgacagctccacagggtctgttcctggaaaccccagctggctgctgacatttcctgggtgcatgctgttccgaggcagatgtcacccaggacccctgaaccagatggggcttctcagatcacagctataacgtgactctcgggactcagtttcccatctgtgaaatgaagaggctccttcctcatcttgcttcagcagttcctgtacaatcaagtatcttagtttgtcccaggagctcagtaagtagccggatgtaccaaaggctcgctgtccaagtgactcacgttggcttttaaatgatggatttctgggattcttgtcttactattagtttgctgtgacagactaaccaacaagaagcaactatgtaagggcttatttcggctcacggttgaagggcacagcccttcatggtggggagccacagtaacccgtttgtgaggtagctgctcacgttgcatcttgcttcagggcagggagcagagagagagatgaatgctggtgtttggctcactttctccttttttcttcagtcctatggatggtgctgctcacagctagggtgagtcttccaacttcaattaacctaatgtgaaaactcccgcacaacagcagcggcctgaggagcgtctcctacatggtcctggggcctagagagttaacaataaccatcaaccaggatgatgcccgggttatatttactgtgcttcacaaactgtcatcttggaaacagccttgtgcctggccttactagattggatcttatttttcaggtaagaaaaccaaagcccagaatccggaatagctcagccctagtcaggtgactctagaccagcggttctcaaccttgctaatgctgcaaccctgtaaatacatgctgtggtgaccttcgccccataaaattattttgttgctacttcataactgtaattttgttactgttatgaattgtaacatcaatatcttctatgtgggatagctgatactcaacctctaggaaaggacccttgggccttaaggggggggggggtctcaatccacaagttgagaaccaatgctctagaaagtggtagagggattttcagacccagtgatggtaggtagagcttaaggttgccccagctttgtgtccaagttccccccccccctcccccgtttactgtgtcagggaggatgacggaccagtttccagactaggaaaacccaggtactgaagaaatgaataaagctgaaagaagcagcggtagctggggtggtggacaaagaaaggcactggcctagcagctgaggggcagaggcctcagtcgcatgagcccatggaataactgtagaagtggctgttaatttcagcaaactgtcttccggtgtcctctgggacactaatgcaaaacagaatcacgtttgcctgcttcattttgtgaggtaattctgtaaattttatttacttgtttgtttatttatttatttattcgtttattttatttttttaaattaaactctatatactagggtttaaatgctgctcacatggggggttcctgaaagccctggagggggcacacgtgggtctgcccgtgttttaaacagaggtatctcctgcaatccgaagtcacttagcctggtgcactttacacctttttaaagattattccccactgccctccccatccccaccccgacacatttgtgtggaggtagcagagacggaaaaagctgtgctgtgtctttaaacagggaggagcgatcagcagaagcctgggctgtaaaaaggctaatgcgctgtggaagagtaggagtttaatctaatttagttggagggtgtctgtctgcggtgttgttttttggagtgtgggaacagaggaggggagctgcccccttgaatggtcccttctgcgccagaagcagtggggagccgcgcgacgccagcgatccaaggcccggccttgaaagaggattaaagcgatgcttgatttgcaattcacacgaaagcgccccgcgaacctctggtaatatttcaatccacatttcaagggaagtggccttaaaatagcggcctaaattgttctgccgcggcccggacactccttcatgcattttataacgcagagggccaagggccttttctctctgcgcctcaccacccccaaccaccccgtatcttacatgtgctgaagtgtaattaaaacttgttcttaagtttggggcaacctacactgctttgtggtatgaggtgtgtgtgttttatgcttggagcatatgtttgtgtgtgttaactaaacatcactttggatgactttaatatatctcctccgaaagggggggggggattgtgaggcagtcgtggaaccaagcctagtgggttggaaaactgaattctcaatgtgtgccttttaaagagaccattaccagtaagcagaccactttccttactgtaaggaacagtttggaaaatgcaaacagagatcttaagagctttccaactggatccgcaaataggaaagttctagaaatggccttgaagctaccaagacaaacgttaaggagccagctccctggttcatcttcaggctgggagacaggatgttcatgtctttctataatctctgcccataccccacatgtttactcttgcaattagcttgtaacaggctaagcttctggcttaatttttctttattgtaggagacgaagtactttttttttttaatcttaaagagattatttgggttctctctaatcctatttcagaaacccctctcaagactttatggttccttcacccatactgaggaaggctgcagctttgattaccactgagacccatggcagagaatcttttcttttttttttttaacttctgactttaccaattaaacagggccttcctttcaactccccaccacctccaaaattatttaactcaagacaccatctgactcttaaagagtattccttccagaataccttgcactctccttggtagacatttgcaagaactctacgctaatatctacagacagtattttgaaatctcacgtagatagatatattaggagatttggggtccaaagtaccctttgctctaggatgctatttaaaatcatgtttaattatcaagtttcattaaaaacccttgctcaaattttgagaaacctaataagatttccattaatttaaacatagctctattcccaggccagtcccccccaccccaccccaaagctttctcttccctcttttatccctggttaaatatgtaaataaaatgtctaaagtcgttcttcaaagaagacaaaagaaaaaaaagagccgaggggagagagacagccataaaattcctcccagctctccataacgcttgccagaggggggccggtttccgagccagggctgagcagcaggggacccggctgctctggagtcactcgtctcaaatcccacacacaggagagagaaaaataaaatatcttttcagctggagccatcaaaggggtcctttcatttattagcgttgccttccactctcgctatctcggggcccttatttttagatactaatgtctatttgttgctttcctttctttttctatactaggttgggcagatggaagaaattctgttagctttttcttctcttaatgtattttaagggagtcccggggggttgggggagagaagaaaggaacgtgaagtgatcatagctaaaataaaaggtcggaacactgtagaagtaaccagagcataaaagaccaattacgtggggcagtctcaaatagctcacaccctgctccggagctgagctcacccaggctacttccacgccccccacgccccaaggggcgggggggggggagtgtggaattaggagagagagagagagagagaaaacagaaggcaaaagtgtcaggaaggaccccttgcaaactagtctgtcttaaagctaagcgatagcccaagaatcttacctgacttaaaaggttttggaaacagcgtactagactataaatatctaagtaaaccatccttatccaagccgcaagcgttcaccacaccgcaggtttttcttgggtcactaacacggtggtgggtggtgattctgactgtgttaacctcagtcttccggaccgctgtttccacggatccaacttcctcccgtgaaaggcagaggggaccaggggatctaaaggtgaggcatgagcctgtgcacacccctccgccccccacccccaggactcagcaggtcctgggagtgtcccagcctcaggtctgtccgctatgtctgacaaatgaaaggggggtaaagaggaagaactccctgcagatgggacgctgaagccttgttttaattagaagtcgatcctctgcaggaagcgcaaggcagggcggggaggaggggtcctgggtagcctcgttcctggcttggctggagccactgaaggcttccaggcatctgtgcacccaactcggccctggggtgcgcaagactgactggccgaaagatgagcaggggacttagctgcacctatgcagttgggggagtccgcactggaggtcctggtagtttcccagacacttaaaacgcagacctgaatgggggtggggtggggtctaaggagagagtgggccaccgccctgagggctgtttatccaaagccaagagtccgcgacaggtgccgcaccccagatctctcggacatctaaggactgcggtgggctcccatggtgcactcactccctgtgcgggggaaggaggttgaagctctgtgtccttatcacagattagcccaaaaccaaccaaggggcaggagccagcatagcaaggcacggagaggccccaccactctgcgtgggaaccagccgtgcgcgtgtaggccggggctcagcctccgcctcccaggaggacgcaggccgagcacatctttcgccaaataatataaatacacaacttcctataataaataaactcagccgcttggagaaaccaccagccggcttggcgcgatggtccccaacacggtggccttggcggggcaagggtcaccacgatccaagccaagcccctcttctcggggtgcggggtgtcagcggcccggaaagtctcctccccgccccctcccttctttctttgagtagaccttgcagaagaggccctaaactccggcttcccaagtcccctccccctcccctgcactcggcccttttgaaatttcaaaggcagcccctccccggagtccgagctccgcgccccgggcagcaaacccccggcttcgggaagatgcgggcagctttacaagccgaggggccacttttttatgagcacggtcataaaacgcaaatcccgtgtctctttgaaagtgccctccgccagggcccggtcgtaaaagtagaagatgcgtccccagcccccaaccccgggtgaggaccacccttacccgagtccccaaacttcccgtaacctcggcgtccttggggtaccggggacaatctcaaggcctcccaccccccctctggggcggggagggcaagcagagaggccggcaggaggtgaggctggaggctggggtccagccccaagctggggctgagggcggaggctgcccggggcgcaagnnnnnnnnnnnnnnnnnnnnnnnnnnnnnnnnnnnnnnnnnnnnnnnnnnnnnnnnnnnnnnnnnnnnnnnnnnnnnnnnnnnnnnngcggaggctgcccggggcgcaaggctttctgatgcaaagcagcagcggggcggggcggcgggcggaggcggggcctgtcaccaatcggctttgctttttttttttttttttccctctttgctaccctttgcctctttgcaagtcttctcatcccgggacgccgtgctggaagcagctgcgggcgccgggagggaggagctccagggcctagggccacggtgtgcccgcgctgccccaccgcggtccgcgatcgcccgcgcccggaagaagaggccaaagtttgcgcgctgagcggcgctcgctccgccgtattgtttgcaaacttcgctcccctcccccgccgccccccgactccgctgaggccgcgcgcccaccgcggtggccccgggcgccgcgagcgctccggccagactggatgggcatgcgcgggggcccgagccggggcgcggagccgcgggcagcagcaacagcccgtgcccgggagcggcggccctgagcggcgctgggacattgagggcgccaccatgcaacacccgggcccgcgcctgtggctggtgctgcaggtgatgataggctcgtgcacggccatcagctccatggacttagagcgccctggagacggcaagtgccagccggtggagattcccatgtgcaaggacatcggctacaacaccacccgcatgcccaacctgatgggtcacgagaaccagcgcgaggcggccatccaactgcacgagttcgcgccgctcgtggagtacggctgccacagccaccttcgcttcttcctgtgttcgctgtacgcgcccatgtgcaccgagcaggtctccacacccatccctgcttgccgggtcatgtgcgagcaggcccggctcaagtgctcgccgatcatggagcagttcaaattcaggtggccggactccctggattgcagcaagctccccaacaagaacgaccccaactacctgtgcatggaggcacccaacaacggctcggatgagcccagccggggctctggcatgtttcctccgctcttcaggccccagaggccccacagcgcgcaggagcacccactaaaggacgggggtccggggcgcgcaggttgtgacaacccaggcaagttccaccatgtggagaagagcgaatcttgcgcaccgctttgcactccgggggtggatgtgtattggagccgcgacgacaagcgcttcgctgtggtctggctggccatctggtccgtgctgtgcttcttctccagcgccttcaccgtgctcaccttcctcatcgacccatcgcgcttcaggtaccccgaacgtcctatcatcttcctctccatgtgctactgcgtttattcggtgggctatatcatccgcctcttcgcgggcgcggagagcatcgcttgtgaccgggacagtgggcagctgtatgttatccaggaaggactggagagcacgggctgtaccttagtcttcttggtactttactacttcggcatggccagctctttatggtgggtggtcctcaccctcacttggttcctggctgctggaaagaagtggggccatgaggccattgaagccaacagcagctactttcacctggcagcttgggccatcccggctgtgaagactatcttgatcttggtgatgcgcagggtggcaggggatgagctcactggtgtgtgttatgtgggcagcatggatgtcaatgctctgaccggcttcgtgctggtcccgctggcttgctacctagtcatcggcacttccttcatcctgtccggctttgtggctttattccacatccggagggtgatgaaaacgggtggggagaacacggacaagctggagaagctcatggtacgcataggggtcttctccctcctctacactgtgccggccacctgtgtgattgcctgctatttttatgaacgcctcaacatggactactggaagatgctggccacccagcacaagtgtaagatgaacaatcagaccaagacacctgactgcctgatgaccacctccatccctgccgtggaggtcttcatggtcaaagtgtccatgctgctggtggtgggcatcaccagtggggtgtgggtctggacttccaagaccctgcagtcctggcaacacgtatgcagccgggggctaaagagaaaaagccggaggaaaccagccagtgtggtcaccagtgcagggatctacaaaaaagcccagcacccccaaaaacctcaccttgggaagtatgaactgcccgcccagccttcagcctgcgtgtgaaggcagagctggctgcaagaacaggacattcggagcccaaatgggcagcttttcttggttggctggttgttggtaaatcaaagtaaaaagaatatgtatatatatatacatgtatgtgtatgcatgtgcatatatatgcatatatttacacatacatgaagtctaccttgaggttcagaacagctgaatgtaaagggttctgttcagtttgttgcctccctgaagggtcgctcattaaggagggagcctcttgtgtaactaatttgtggtaaagtagttgattcaaccgccctccagaaaacttttgtttaggcctcaagcacacagctgtgtattcagaaggctttgctgcctgtgcataaacttgaggctggagagctcctttgtaagctaaagagctttcctggggggggggggcagccagtgagccacccaagggcctgctctccctccctcactcccccagctaggctgctgtatgggtgggagggaaggtgaggnnnnnnnnnnnnnnnnnnnnnnnnnnnnnnnnnnctgctgtatgggtgggagggaaggtgaggaggagaggggataaaagaggtgacaccccccccagcccaaggtctgcctgcagatcccttaaaagagagtcacttccccagccttcatagccatgtttctcccaacacagagcccacgctaccctctcaccccactgcagatctaacactggagaattcaaatggtgtgcaatacttttttttttttttttttacattttccccctctccctagcaaaacaaatgagagagagaaaaagtattttgttgtaaataaaaggcaagaaaagaaatcatctaacaaaagaatttagaggctcaagcctcagggttgggggttgggggggcgccttcagcctgatacattttgtggctttttaatggaaaccaagccagtgtgttctacacactgggactgatttgtggagaggaagggggagggggggaagccagtggagagcaccagagggcttattgactctctgaattgttaaacaaatgatttccatgagtggtcttgaagcacttgggaagacaaactttgtctccagccagggagggccatgcctgcctctgtatatctgtaatataggatatttttcatgctccactattttattaaaaataaaagacattctttagtttgctgctagtcactgtgcattggtgaggggagcgttctccatttcttagcagattcttgggtgtgcgaggctggctagacatggaccatgaacctggatacaagctggcaaaataaaacatcctggggctcagaggcctgtgtgctggctgtgggaaaaggtggcggtgactctgcccccaaggctccatggatacacagaatgccgagaccacactcacccaggatgcagcagtctttacctgacctactgtgtgcaccagtctgagtggaccactctactgcagctctggggccatgggatacatttcagagctggataggtgaaagtgggactaagtgtgtggtggggggagggtcatcagcaacaaattcagaagcttggccaccttgaagtttctggtaccctttcttctcatcactaagacaagctataggccctggagcagacccaggatccactaggcttgactaagctaaagttctagctagaaggacccaaggacacagttcagctctgagaaattgggggggaggggtcagtgtagacctacccaactctgaccttcatagctcagaagcactttaaactatttgagcccttctgaagcagagataccagcttgatcgtggctttctgaagcaagtattggggaagtttcacagggccatgggtccttgagcaggaaggacaggtgaattgggtagtctggggaacaagttctagaaatcaatgctgggcagccgggccatcggtgagcataaaacccagaacccagaatcatggaaataaacctctatattgactattgttgtccttaccaccagaagagacactaagagtgagtgtgtgtgtgtgtgtgtgtgagagagagagagagagagagagagagagagagagagagagagagagagaggatcactggagtggcaactggccagacctaggctcatctgcccccctgagctgtagtggttagttgtataggttttgaaagttcatacagagcaatgcctcagccaagaacatgataaggccttgttcagctgtgagcctgcttgacggtggccccatccccaacagtgacagggatcctgtttacaaatatcaagagactaacaagtggccagaagtgtgcttttaacatgtgctccttgggccatagtgagaacagcctgagcttctaaggtatttgtttcctgcaccttctcttgtttcatccgtctctctacctgcatcagtctgtctcttgcagttgaactctagttctaaaccagatggtagatttaaagaaaaacatcaaagcttaaaagttagaaagcttacacccagacacacagacacacaaacacaccacttatctttggacacccccccacccccccacccaatcccctccccctcagctctgtccagacctcgaaagggaactgctgtttccttaatttggagactgtaggcttcactccaggaccacagccatgctgatggagagacaggaggatttctgagttcgaggccagcctggtctacaaagtgacttccaggacagccagggctatacagagaaaccctgtctcaaaaaacaaaacaaaacgaaacaaaacaaacaaacaaaaaaccccaagaaaatcaaaacaaaacaaaaaaaaaaaaccccaaccaaccaaacaaacaaaaaaaggcccggaaaaggtgaatgtcaaggtctcaaagcactcagttcttgatctcctaccaccagctgttgctcacatgttaagagagcccgacttagggaaaccatagcctcatagaggagacagcggctcacgtctcctgagttccaaatattggggagatatcctgagccaggggtcccccctgtggttgggagacccagcacaagtgcctgcaagaaaagtgaagctgctggggtcatgcgaagggcaaaggtaggaaagagaacacccctttgagaaagtgataggcagggtctagctggtgccccttatataccccacaccaagcacagtgtcttgtccagtcagtacacaacacagggaaagaatggggagaacagctgtggccacagcccaggcagatatgagagcctctctggaccagtggttcaggaagtgatcttttcagtagatggcgtcgggggtggggagatccaagaagcaccaggtgtctgtatgtccagccctctgacgaggaaattcaaggttcaaagggctccggagtccagcctaaggtctcagcttattttttgaactcagggtctctcactaaactagtcaccctggctagactggccagtaaactctggcaatcctgtttctgcctcctctctagcactgggatcatgaatacactgttacactccagtgttgacagggaactaggggttcaaattcaaggttcctttgataattcctagactaagccaggatatgagatgagcactaagcccagaacagtccagtgccacaatggagaaaccaggcctacttatacatccattgcccctcccctcggagagtcaaacatgcctcgctaatggtctccaaagagaatgagcttttgagctttccttacgggaacactttccgacgccaggcacaggattccagagaataccctctgatcttgcaagtgtaaaaggcggcgcagtggcttcgccccggtgagggagaccctagctctgtgtctttgaacaccctcacatcacagtcacctcccagggacaagggctctgtgctgactcctcccccaagcaaacggatggcccagcagcaacagctggaagatgagaaacgcagacaggctgcaggggagccccgggatgacacggggctgggggttttcatgttttattaagagtgcggaaggccaagctggggggaggagggactgaggcgtttgaaatccaaaaagaatgagttgctatcaggtaggtgagctgttgtaattggggacacccctaggaaaatgacacggttggagcgctggcaggtcctcggcagcctgtgggaaccttcggaaggcatcgtatcttgccttttattagaagacatttttaattaaaaaatggggattcccagcctctcctccaggggctttagtgtcaatgaaaggattcaaagccattctttgcctggcacctgcctccgtctagaaggtcgtggcttctgggggccttggagggagagttctcaacctgagcactagactatatcttaaaggctattcttacctgttttaaggacctgtaaaagcagggtgatgcatgccggaaattctagcgtttgtgaagttgaggtaggtcagttgccagctcaaagtcagcctgggctacatagggagagccttactcaaaacaaggaaaacaccctctcatggtatcccgagaacctctgcatttgccccatccctaccctcagagtcccaaacacacacactgttagctatgtgcaccatcctccactggcaacctgcctgcccagccacccttagatccccatactccacaccccccactgcccccgctatgattcttctgaggctattatcaatctgccaaggtcccgtctgtcaccagggtcccatgaagtctggcctggactaaactcagaggcaaaatttcggttacttgcttttctttgtttggcctggagcaatgagtctatcattagatttttctctcttggagaaatatgtctacatggataaaacggtttgttgaaagggtggagaagggtggactgtaaaacttgccgttctcccacagtggctgaaagctgagtgttttccatcagtgaagtccagagctcttccatgtttagccttagcccatctcccagctaagcagaggacactaaagaaggcattccccacagggaccaaggagatgtgttgtttattctgacttacccttcagagggctttttttccccccagtggaaaaaatgtcccaggagctggggaaatggctcggtggatgaagtgtttgctcagtaggtatgaggagaggacttgagttcagatcccaggtacagccccaagtgtggctgtgcctgtctgtaatcctggttctgggaggtggagacaggaagatcctggggttcgctgagcagccagtctagccaaaatggagatctctgggttcaatgagagactctatctcaaaaagaaagccagatgaagatggaattgaggaatatgctctgtcaacctctggcttccatgtgcactcataccagcatgagcatcacatacatacacaagtgtacacacacacacacacacacacacacacacacacacacataagaaatgaaaagatactgcctatatcttaggtgctaagccaacgcccaagtaagatacccatatagcttaatgaaatcacatctttccatctggggtatgaagtgtgtccttttggaacacaagagagaggctgtgcacctgggagaaaacaggagaaatcttagttttgtttcctgttgctgtgttaaaatgtcctgacataagcaatataaaagagatggctttatttggctcacaatgccaggttactgtccatcattgcagagaagtcaaggcaggcacaaaaagcagctagtcatgtgacacccagagtcaagagcagagagacatgaatacacgaatgcttggagacagaaggcattctcaagggagtagggacaatagacatttgggcaactttgggtaactttagaacctgctgggatccgatctatctatctatctatcgatcacttccatttgatggtagattgctggtgtgcatatgctactttatggcttgatggctcagatgacacagatgacacaagctcaggatagggagttcaggttgcatggtaaccctggtggcctattgtcaagtgttcagttcccaccacagcccagtagcaggtcgagagctgtctctcaaagggagaatagttgtctgcagatgatggcaaattcttcctcgagggattctctcgtggttcacctatagaggcttgccacaggctccaagcagcacctctgactgccactgccacctcaagaaccattgagtttgctggatcgtgtgaccaagtggcaaagcagcctagacctgttgaagagcctttgcctgtcccaggtcccactcgaagctagcagcttgccaagtcacttcgtagatatcggcccaagcgacacacccaggtgaggaatgtgctgtctccagaatccaaatagacccactaggcattgtgcttctttcttgatggtgggagggaccaggtacaacaacttatccctcactttagaaggaatatctctgcacgcctcatgtcactgaactcctatacatttccctgaggtagaaggcccttgcattttggttggacttaattcccatcctttgatgcacatacgtgttaccaagttcagagtggttgcaacctccagcttacttggtccaatcagcataatgctatccaatatagtggatcagtgtgatattggtagaagaggcaggtggtcagacctcttcaaactaagttatgacacagggcgggagtgttaccatacttttaaggcaaaactacgaacacatatagctggtctggccagctgaaagcaaactgcttttggtggtccttgggctgagggaaaaaaaaaaggcatttgctagatcaatagctacataccatgtgccaggagttgtgttaatctgctcaactaaggacaccacatctggtacagcagctgcaatcagagtcactatttgattagttctgtgatagccaactgtcattctccacgagccatctgtcttcttcacaggccatacaggagagttcaagggagatgcggtagaaaggaccacctctgtatctttcaagtccttgatggtgacattgatttctgtgatccctataggagagagccgagacctgctgaggtgcttgcagtgggtggagcaagtatggaatgggtggtagagaaaagtagtcatagctaccagccaaggtcacggtgatctgctacagaagtgagggctgtaattggcctaagcgcttctgtcttattttgttacaaacatgtttagacatagatccattttgttaagaacacgcttacacatatattaagccaaactccatgttttctttgcgtttacttatttattgtgtgatggaatattgatagagacggtatccacggttaaagtggtgtaaatctacattatcatatttaagtgataagacactaaaagatgaagcattcaagacactttgcctcctatgctgaggggtacacctgcagttagaggtggagcagctatatcatgctatacagaattgtgatcctgttatcactttcatttggaaagttagcaaggtcaaaggagatgcgattggatggcaagaggggtcaacttatcttagttgtcaactttactagatcttggatcaggccaataggcaagccattggacattcctgggaggaattttcttgattagttgaaatgagaagactcacttggaatacgggtggcactttctgaaaacttcactgagtgcggacaacacggttggcatttcgatgttgtggacagactgtgctgacatctggcctcttgggctttcttaacacagactggtgagccagtggctctccaggaattctacatgccttcagtgcctgattgacagctcgcccctccggtgtgaaggtagccatcattgcatggcccagatgatatcgtgtaagttaacctaataaactcctctttaacacacacacacacacacacacacacacacacacacacactcattctattagtttcattcctctaggaaaagacagatgagaggaagcctgtctttcctgcacagaacgtgaaagtcatctgcgtggctgctgcaatcattttgtggccatgaggcaataggcccaatattaaagccaaaaactctgacaggtactaatcaagaagcagccagccttgttatgacttcattaaacgtttgtacctccaggcttcttgttaggcaaggtaattaagtgcctggttttttttttttttttttgaatgtcagcacgttgggtgtcctgctcttagaaaagtagatctggtagagtcaaccagtttagggctcctcgaagtttatcctggatacaaatcaaccagaccagaactcttgctggagttcaggtgctgattcttagtggacctgaggcatagttgcaatgaggtttagaattcttgaagcctgcaggtgcttcattccctgtacagcgaatggtcactgatcatccaagcaggagcctgatgagtgtaaagaaaatataagaacaaacttctttttaaaaattaattgattcattaattaggttactcaagacagggtttctccctgtagtgttagctgtcctggaactctatctgtaaaccaggctggctttgaactcacagcgctccacctgcctctgcctctccagggctgagagccacccagttcaagatcaaatttcttttttagatttatttatttattttatgtatgggagtaccctgaagctgtcttcagacacaccagaagaaggcatcagatcccattacagatggttgtgagccaccatgtggttgctgggaattgaactcaggtcctctggaagagcagtcagtgctcttaaccgccgagccatctctccagccacagcagcaaagaatcctggaagatgtgacttagttgctggagtgctagcaggcatgacgctctgggttccatccccaggaccacacagtggtgtggtgatgcacacctgtaatcccagatagtaaacggaggcaggaggatcacaggttctgtgtcaatcacaggtacatagagagtacaaggccagcctagacgaaataagaccctgtctcaaaaaagagggggaggaagaaagatagggatgctgagttacagctagtctggcccctctggagcaaagagaatatagttcaaattcttcctgaaattccaaccctctgtgttgttctgttactggacagtttcttaattgttactggctgtcaactcgaacccaaaccctgtatcactttctttcttttttttttttttttaagcaacctcgagtgccatttaatatcactgctgcattgttaccacagaaagctgggtagatcacgttaggggtgaaaacttcccagagagtgtcaacttgttgactctattgctccctaatgagggagcagagatgtccattcaaggatgagcagatggggaaagaaggatgagaagctggaggtggggaagggctgattagaaggagctgaggcgtgaacgcaagccttctttcttcatgggagtcatgtgggcgtggatctgccttgtgggtgctttggcatatgaaggacacagccaccacagttagaagccagtcggacagagtgggggagggtttcatacagtggtcgctgcccagacgctcccgagaatctgatcttggttgctcccataattcagcctcttctgacctctgacctctgcctcctgccgcttcctgaattctaaagtcatcaggactggggtcctacgctttgcctgcttcttcatcttcaacgagaagtgtctagtaggacctttgcctgatgcatgaaagtattatcagtcacacaaaatccagaactcaagaaagacttccttgatatttaatagatttaatattctcttcttcgtcccagttttagactgtcttgagctatgcaaggttctctgggagttctccctgtatcactttcaacctg

SEQ ID NO: 253 - DNA, 1749 bp, Mus musculus
atgcaacacccgggcccgcgcctgtggctggtgctgcaggtgatgataggctcgtgcacggccatcagctccatggacttagagcgccctggagacggcaagtgccagccggtggagattcccatgtgcaaggacatcggctacaacaccacccgcatgcccaacctgatgggtcacgagaaccagcgcgaggcggccatccaactgcacgagttcgcgccgctcgtggagtacggctgccacagccaccttcgcttcttcctgtgttcgctgtacgcgcccatgtgcaccgagcaggtctccacacccatccctgcttgccgggtcatgtgcgagcaggcccggctcaagtgctcgccgatcatggagcagttcaaattcaggtggccggactccctggattgcagcaagctccccaacaagaacgaccccaactacctgtgcatggaggcacccaacaacggctcggatgagcccagccggggctctggcatgtttcctccgctcttcaggccccagaggccccacagcgcgcaggagcacccactaaaggacgggggtccggggcgcgcaggttgtgacaacccaggcaagttccaccatgtggagaagagcgaatcttgcgcaccgctttgcactccgggggtggatgtgtattggagccgcgacgacaagcgcttcgctgtggtctggctggccatctggtccgtgctgtgcttcttctccagcgccttcaccgtgctcaccttcctcatcgacccatcgcgcttcaggtaccccgaacgtcctatcatcttcctctccatgtgctactgcgtttattcggtgggctatatcatccgcctcttcgcgggcgcggagagcatcgcttgtgaccgggacagtgggcagctgtatgttatccaggaaggactggagagcacgggctgtaccttagtcttcttggtactttactacttcggcatggccagctctttatggtgggtggtcctcaccctcacttggttcctggctgctggaaagaagtggggccatgaggccattgaagccaacagcagctactttcacctggcagcttgggccatcccggctgtgaagactatcttgatcttggtgatgcgcagggtggcaggggatgagctcactggtgtgtgttatgtgggcagcatggatgtcaatgctctgaccggcttcgtgctggtcccgctggcttgctacctagtcatcggcacttccttcatcctgtccggctttgtggctttattccacatccggagggtgatgaaaacgggtggggagaacacggacaagctggagaagctcatggtacgcataggggtcttctccctcctctacactgtgccggccacctgtgtgattgcctgctatttttatgaacgcctcaacatggactactggaagatgctggccacccagcacaagtgtaagatgaacaatcagaccaagacacctgactgcctgatgaccacctccatccctgccgtggaggtcttcatggtcaaagtgtccatgctgctggtggtgggcatcaccagtggggtgtgggtctggacttccaagaccctgcagtcctggcaacacgtatgcagccgggggctaaagagaaaaagccggaggaaaccagccagtgtggtcaccagtgcagggatctacaaaaaagcccagcacccccaaaaacctcaccttgggaagtatgaactgcccgcccagccttcagcctgcgtgtga

SEQ ID NO: 254 - protein, 580 aa, Mus musculus
MQHPGPRLWLVLQVMIGSCTAISSMDLERPGDGKCQPVEIPMCKDIGYNTTRMPNLMGHENQREAAIQLHEFAPLVEYGCHSHLRFFLCSLYAPMCTEQVSTPIPACRVMCEQARLKCSPIMEQFKFRWPDSLDCSKLPNKNDPNYLCMEAPNNGSDEPSRGSGMFPPLFRPQRPHSAQEHPLKDGGPGRAGCDNPGKFHHVEKSESCAPLCTPGVDVYWSRDDKRFAVVWLAIWSVLCFFSSAFTVLTFLIDPSRFRYPERPIIFLSMCYCVYSVGYIIRLFAGAESIACDRDSGQLYVIQEGLESTGCTLVFLVLYYFGMASSLWWVVLTLTWFLAAGKKWGHEAIEANSSYFHLAAWAIPAVKTILILVMRRVAGDELTGVCYVGSMDVNALTGFVLVPLACYLVIGTSFILSGFVFHIRRVMKTGGENTDKLEKLMVRIGVFSLLYTVPATCVIACYFYERLNMDYWKMLATQHKCKMNNQTKTPDCLMTTSIPAVEVFMVKVSMLLVVGITSGVWVWTSKTLQSWQHVCSRGLKRKSRRKPASVVTSAGIYKKAQHPQKPHLGKYELPAQPSACV

SEQ ID NO: 255 - DNA, 23254 bp, Homo sapiens
accactcccgggcccaggagagatgaacaagcatccttagcataggccgcaggccccacggggaaagtgggttctctgaccccatgcaggctgggttgaaagtcaggccccgccactgactggctttgtgccccagagcctccgtttcctcctctctaaagtggaaagactatggcacaagcccgggagaaggattcgatgacgtgacacttggagaccacttggcaaaaggtctcgccctatttgggcttcccagggacacagattgcgtggcttaaaactgcagaaatgtattctctcacagccctggaggccagaagtccaaaatgaatatatctgccaggctgcgtacccaccacagggtccagaggaggctccttctgcctttgccagcttctggtggctccaggcattcctcggctcacggccacatcactccagtctcggcgtggccttctctcatatcttacatctccctccgtctttctcttacaacatcaccagtcattggatgtcaagcacagccggataattcagggtcacgtcctctcaagatccttaacatgattacttctgcagagacgtaatgtagagctttttccaaataagatcacagccacaggttcccaggatcaggacgtgaacaggtcttttgggcgaacaccatttaactcgctagaagcactcagcgagcagctctcagaaacagtggctctgaggacagcagctgttaggattgtcagttctctgcctgtctctaccctccctaattctagggagaaacttcatttactccacaaaccctaggactccctaaacctagctggggtctctcctgcatagaatttcagaatgcttaaaaataaagctgtacaaacgtgtagatatgaaaagtcgtggagtgggtgccagctttttgccattggtcgtggtggcgttttattgtttctctcttagggaaaactgtaggatggagtagaagaatgagttttctggcagggtgcagtggctcacgcctgtaatcccagcactttgggaggctgagggaggggcggatcacaaggtcaggagatcgagaccatcctagccaacatggtgaaatcctgtctctactgaaatacaaaaaaaaaaaaaaaaaaattagctgggcttgatggcacacatctgtagtccaggctactcgggaggcagggaaatcacttgaacctgggaggcagaggttgcagtgagctgagaccgcaccactgcactccagcctggtgacagggcaagactctgtctcaaaaaaaaaaaaaaaaaaaaaaaaaaaagaagaagaagaagaatgagttttccatcaaaatggacagccttggtccatggtcaaaatggacagccggcccaggcttgcctggtggccctctaagcagaatccaatccctgctgaccgtggcctcttctgcctccggggtccaagccaccagcctatctcctctgaaccactgtggctgtctcctaactgtttctctgcttcactctttccctgccactatgtgtccttgatgcactagccagaagggtcctgggaagactgaagtcagagcatggctctcgtctctccagaaccctccgtggctccccatttcactcagagtcaaaatcaaaaggcccatagacgccatcatggcccgatttctttccctcccacttcctctccacacacctcttctgtcacctaccttctgacgctggcccctatgtcctgacttccagccattggccccattgttcttcctcaaaaaccccaggtatagtggcacttcagggccgtggcactggcagacaccccattatcccagcaggcacttctagaagtgccctcagctctctgcacccactcctggtgtctttgctcagtggtctccttctcatccaggccttccctgcccatcttgctaaaactgcagcccccctttcctagctctctggatggcatgagccgctcacctgccccgcacgccacgcaccgtggaacaggctgtagcacgcacatgtgcagaccccggcctatcgcctcctcctactggaaggtgaactccatgagggtgaagacatctgtccttctatcccctgctctgttttaaccatctggcaaagcaagcacactcagcgcagcacttattagaagggagggagcagaacaactattctgggactgacttcctgctggaggaggaacagaaaataaatacataagcagatgagtaagatcatcgacgggcagaaaaagtaccacaaacaaaataagagtaagactgctccgagacaaggggctggggagggggaacctgagtaggaggcagcctagtggacgcgtcacccaggagcagacatcgttcagccatgaggaggcgggggatgcagcctcctgatgtgtcagctctgaaagctaatgactgtgcctgcgtgtgtgcgcatgacatgcgtgagctgtaagggcagctccataattagattatatatgtgtgtgcgtgtatatatatgtctgtgtgtatatatatgtgtgtatgtatatgtctgtataataatatgcatacacacgtgtacatatatataacctatatatctctctatatagattatatatgtgtatagtatatacacacatatatattatatatgtgaatgtgtgtgtatatatgtatatatgtgtattatatatacacacacacatatatatgtatacatatataatctatatctcagagagagagactgacctgccagcagatgggcagacatttgtcagacatggagagagtgtctttattcctaaagttggtttctcagctgcaagggcaatggccaagcccttcccaatcttaccttacgaaacaagggtgacaggcattcagggatagcaaaacgatctttcctatcctattttgggccttagagaaaagcgtaattgtgcatttaaactgttgtttgggatgagggcagcagagcacacagctgttggaaccagtttctcttcatgctatcacatgaggctggagcctgaactatctctgggaggctgcagaaagtgggaagggagtttcagatccatgctggaagaacagggaaaggctcccgcagggctccgggtggtgtctgccgctgattcagcaaaggacttgtcctggacacggggcatgtgggagctgagcacgggatttcaggtcctgcttcacctccttctcatagggaagaagctgtccactgctcactcctggttaaattcaaggaagaagggatacacaagtgtggcagccctatagaaaagagaaagactcgtaagtgatgctattagtaagccatcttggcttccggccagtgaagacaaatgaatttaacaaagaaaagtcaactaaccagaaagtttacagaccagtgaatcccacagggctagcattatgtgccaactcggttctcagagcttactgagttatctcacttcattcctaccccgaacctgatcaagtaagtgtcattgttcccattttacagcagaggaaacagaaagaatctcagagaggttaagtaacttgcctggggtcacacagctgaggacatgggtaaaccaacacacattaatacctcccacattgcttcttccgccatttcctccctgtttgtggctccaaagaatcccttcagacaccatcacggggaatatcaacatgacaggaaagtggcagcctcgccccaggccaggagcccctgaacaaagccataaaccaagacttgatctttgcctggctccagacaggacagcagaacggggtcccattctgaaagtcaggctccatcacaagtacccactgtgcttgcatctccgtggagaggcaggaggccaggcgtaggcagctgagcccctgggggagtggaatggtgtcggctctacccccagtagccccgtggcctgggtctagtgactcggactccccagccccagttgctcctctctgaaatggaaatcttctctggaccagcttcctggggtacctatgaggaggcagtgagctgcttcctatcaaggcttaaggcagcacctgtcaaatgcttagtcagcctcggctcttgttagccttttgattatttgcttgccttgattatcagcttgtattactgtgtgcctgacactgacatgtccccaaactcctccccacaaatgtcacattccagtgcctctccttattgtgctctctccttccatttatattgcatttcaacaataataaccgctactcatcactgagcacttatttggtgcttggtattgccatcaacgcttccaagtgtgttatgacatcatcctcatcgtgccttgggaagcgggaactctgctggtcccattttgcagatgagaaaaccgaggcagagcaattagaagtggcatatctgaggtcatggggctagaaagtggaagagggggattcagacccaggcatccgggtcgtttcctccccagatcatcactgtggtgcggggctgctcaggcgtttggtgagtggctgcagattcagagctcacctaaggtgaaaagcaggaacggggttccttctcatttctttgtaaggcagagccaagctcgtgggtgtccccactctgtccctgaagggatagtttctctgtgtcatctttgcctcctctgtcacccatgcaggggccgcaggcctgtgatgagctgacccactcagctcccagaacaggcaaaagggtcccagggtgcaggagggaagccgaaagaaaacagatgggaaggggagtaattaaatcagcacatcccaaacagctaagggaggggacaaggagcaaagcaatgaagaccaggtatgaagtctgaactcacagaatgggcacgcgcttccgataagctgtccgctcaagctgtttggaatacaaacaccaaccaaaacaacacacgcacacactcttttgtgtcgtgtttctggaattctgtgatgtttcttttctcatatattcctccaaaaacagtccagtacagaattgcaggttgaagcactgtgaataggctctaggtttgccccaggttaagggttaatttgttgagtttcagaacaggtaggcgacgccctcctggattttaaacagataacgtccttgccatgtaagagcacttagaaggctggctttatctctttaaaaaaaaaatatatatatatatatacacacacacacacacacatatatacacacacacatatatatacacacacatatatacacacacacatacacacacacatatatacacacacatatacacacacatatatacacacacatatatacacacatatatacacacatatatacacacacatatatatacacacacatatacacacacatacacacacatatatacacacacatatatacacacacatatatacacacacatatatatacacacacacacacatatatacacacactatatatatatatatgattgtgtttgttgttgttgcagttgcagagatgaaaaagaaatctgtgtctttaaatgaggaggggctgcgtaaggaggcttgggcagcaaaaaggctaatacgctgtggaagagaaggagtttaatctaatttagttggagggtgtctgtctgcggtgttgttttttggagtgtgggaatagaggcgggaagctgcccccttgaatggtccctcctgagccaggagcagtggggagccagtcgacgccagcgatccaaagcccggccttgaaagaggattaaatcaatgctctgatttgcaattcacactagtgcaccccgtggaacctttggtaatatttcaaaccacatttcaagggaagtggccttaaaatagctgcctaaattgtgctggagccacactggacaccccactcatccactttaggatgggggtgcttcggggttcatttctcaccttcccccaaacctccacatctcacagccagtgtttttaggcagaattaaaacttttgcgcctgttgaattcgctgcgacttgcatggcctttctggtggtacaaactgtgttttctttgctaagtatcacttcagatcactaaaggtattttccctggagaaaaagatgggggcacgccacggggagcatgcctacttgatcagaaaacataattttttgtgcatgttttatatctgataagtttctgcagaaacttgatactagatgaggtcagagaaaacaaggtctattcacatcagacttccctgcatgtgaagcaattattggtaaatagatcagttttcattctcatacttgaaggtagaattggaaatgtcccggactaaatacaaacattgacgacacgagaagacaagagaagaaacacaagaatcacttacgtggatcctcacacttgaatgtaccaagagaggtgattcaagcagcagctaccgaaaggcgttgcgacagcctgaaccactttttatctcaacattcaccagcacgattttacttctgtttatgagctttcttcctatgccaccagtttactcttgcaattagcttgtaacatgctaagcttatggtttaatttctttctgttgctgaaagactcagtacttttttatcttaaagagattatttgggttttctctaatcccatttcagaaaacctcgcacagtgcttataatttccattgactattacataataagaaaagatacaactttgatttttagcaatatccgtgtcaaagtacttttatacttttgactttgtgagtttaaatggaatgaaactgggcctctctttcaattcccctccacctccaaaaaatatttagttcttgttcaaaacactgcctgactcctgaaatattctctctcaaaaacctcatactttccctggtgaacgtttgcaagaacctgaaggcggataatgtttactgatagctttccgatagacagacatttttaggtggttgggggtaaaaacatattccttgtctctgcacgttatgtgaaatcatgtttaattataaagtttcattaaaaatctttgctcaaaattttagaagcctaataagatttccattaatttaaacatatcactattcccacgacggctccaaagctttcttttccgtctttcatccatggttaaatatgtaaataaaatgtctaaagtcattcttcaaagaagacaaaagaaaaaagagctgagggaaagacagccataaaattcctcccaattctccataacatttgccagaggggggtcggttgccagccagggctgagcagcgggggaccccggctgctccttagactcacacatctcaaatcccacacacaggaaaaaaaataaaataaaatatcttttcagctggggccatcaaaagagccttttcatttattagttacagacttatcttccagttgctgatttctcagaaccctcatttctctataataaagtctatttgttggtttccatctcagctggacagggcgaagcacttctgcagacatttttataaaaaacgagagaaaaaggcaatctgaagtggttatagctaaaataatgggcctgaacgtggctgaattaaaacagcacagaaaagatcaattaggaggcactttctcaaatagctcacacccagctcccggcgtttggctctcactcttgcactaaatatttctaatagttgctgagggagagacacaaaaaggaaaagaaggaaaatagggcccaggaaggacctttgccaggaaaattctagaaaagccaagtgatttccgctgaattaattttaatttaaaggtcctgaaaaattactcactagacaaaaaacaacaacaacaaaaaaaaaaacactataataaaaatggcagtctttcaaaaataaaatcatgcaacttttcacttgggaaataacacagttgaaggtggtgttctaactgcccggagtttctaccttctttttcactttctccctcaccccgacttcctccagcacctcctagtgagacccaggacacccagggacagcgacccaggggtgggtgcctgaacctgcctattaattctgggattctgggcgctcaaatgtctgttgaacggatgaatgaatgagtggaaaggtgagatttccccaagtttcttaccgatgtaaaaattgtagggcttgttttaattaaaagccaatactctccgaggaagtggccccctcctgcacggcgtgcagaaagctggtcagtgaggggggttcctggcgggccccatctccttcccgggcgcttcctagggagaccttgccccgtgcgcagcgtccccaccgcgggggcccgtgcagccgccccccacgccgggtggagcgccgccaacgcgggaagccccagcactgcctccaaagatgtccgcacactccaccctgctccctggaactatcctcaaacgggcagggggcaagcgaggccggtggacgcgggactcgctcctctgacctctccccggccccccgggaggtagcgggagattgcacacgcgatcctgcgagtttccgaactttggaagatcgtgacccggagagaccctgggaggagagggccggccacctcctaggggtgctgtttttttaagggtcaacccaggacgctacgggaagcacctggcgcatccttgggaacagtggggcttggcggtgggcgcccaccgcgaacgccctgggcgggggaagggaatggcggggggacgtcgtgtcctaagtgaccccgtcacagacccgccccaatccgaggggggatgagctcagaggacctgcccaggacgctccttctccactttccaggaaaaccgagcggcgtgcgcgcctccgtgtcctcgcgggagctgggggtccccgggcaggcgctgacgcgctcctcccacgacccactccatcccaccctactccgggtcctcctgcggggctgcagccaaggagggcgctggccgggcacatcactcgccaaatcacataaataccccacgagcgaatgacttcctataataaataaactcagccgccaagaaggcatctccagccctgctggcgcgaggccccggctctgcggcttcggagggggcgggggtcaccgcggtacaaaccaagcccgcacttcccgcggggtgggaggcggtgttcaaagtcccgggacgcttcccgcccctcccccttcccgccttcttagaggagacctcggatgagcggccctaaaatccggattctcgagcccctccccctccccttagctcgtctctttgaaatttcaaagaaaatccctcctcggagcccggagcccggggctggtagcacctccccagcctcaggaagatgcgggcaggtttacaagcaagggcctactttatggcccaggctataaaacgcaaatcccacctccctttgaaagcgccctccgcccgggactcaccataaaaggaagagaagatgcaccccgcgcccctcgccgcggaccacccccaaaccccttctcccgccagtccccgaacttcccgtaacctcggcgtcctcggggtgccggggaccatcccggggaccgccgggaaagggggcgccggcggagaggatagcgagaggcaaagttggaggccaggcagagagagggcgaggagaggcgggcgggactgccggggagggtcgcagcgcgcagagccccgcgcgccaggcgggctgtcccggggctggcgggcgacgcgggcgggactaggcgctgcgccccccgcaggctgggctgcaggccgggggggatcggcccccgcggggcccgggagcccgcggcggggcggcggggaggaggctgccccgggccgctgcgctttctcatgcaaagcagcggcggggcggggcgcgcggcccgggggcggggcctgtcagcgctcggcttttctgcccccctttgcctttttgcgagtcttctcatcccgggacgcaaacctcgaaacagctgccggctggtcccggccgaggccggcgcagggagggaggagccgcccgggctgtgggggcgccgcgagctgggccggcctcggtgtgcccgcgccgccagcccgctccagacgcgccacctgggcgctccaagaagaggccgaagtttgccgcggccgtgagttggagctcgcgccgggccgctgcgccgggagctccgggggcttccctcgcttcccggtattgtttgcaaactttgctgctctccgccgcggcccccaactcggcggacgccgggcgcggagagccgagccgggggcgctgtgcacagcgctcgggccaggccgggcgggcatgggcgggggcccgagcaggggtggagagccggggccagcagcagcccgtgcccgggagcggcggcgctgaggggcgcggagctccccgcgaggacacgtccaacgccagcatgcagcgcccgggcccccgcctgtggctggtcctgcaggtgatgggctcgtgcgccgccatcagctccatggacatggagcgcccgggcgacggcaaatgccagcccatcgagatcccgatgtgcaaggacatcggctacaacatgactcgtatgcccaacctgatgggccacgagaaccagcgcgaggcagccatccagttgcacgagttcgcgccgctggtggagtacggctgccacggccacctccgcttcttcctgtgctcgctgtacgcgccgatgtgcaccgagcaggtctctacccccatccccgcctgccgggtcatgtgcgagcaggcccggctcaagtgctccccgattatggagcagttcaacttcaagtggcccgactccctggactgccggaaactccccaacaagaacgaccccaactacctgtgcatggaggcgcccaacaacggctcggacgagcccacccggggctcgggcctgttcccgccgctgttccggccgcagcggccccacagcgcgcaggagcacccgctgaaggacgggggccccgggcgcggcggctgcgacaacccgggcaagttccaccacgtggagaagagcgcgtcgtgcgcgccgctctgcacgcccggcgtggacgtgtactggagccgcgaggacaagcgcttcgcagtggtctggctggccatctgggcggtgctgtgcttcttctccagcgccttcaccgtgctcaccttcctcatcgacccggcccgcttccgctaccccgagcgccccatcatcttcctctccatgtgctactgcgtctactccgtgggctacctcatccgcctcttcgccggcgccgagagcatcgcctgcgaccgggacagcggccagctctatgtcatccaggagggactggagagcaccggctgcacgctggtcttcctggtcctctactacttcggcatggccagctcgctgtggtgggtggtcctcacgctcacctggttcctggccgccggcaagaagtggggccacgaggccatcgaagccaacagcagctacttccacctggcagcctgggccatcccggcggtgaagaccatcctgatcctggtcatgcgcagggtggcgggggacgagctcaccggggtctgctacgtgggcagcatggacgtcaacgcgctcaccggcttcgtgctcattcccctggcctgctacctggtcatcggcacgtccttcatcctctcgggcttcgtggccctgttccacatccggagggtgatgaagacgggcggcgagaacacggacaagctggagaagctcatggtgcgtatcgggctcttctctgtgctgtacaccgtgccggccacctgtgtgatcgcctgctacttttacgaacgcctcaacatggattactggaagatcctggcggcgcagcacaagtgcaaaatgaacaaccagactaaaacgctggactgcctgatggccgcctccatccccgccgtggagatcttcatggtgaagatctttatgctgctggtggtggggatcaccagcgggatgtggatttggacctccaagactctgcagtcctggcagcaggtgtgcagccgtaggttaaagaagaagagccggagaaaaccggccagcgtgatcaccagcggtgggatttacaaaaaagcccagcatccccagaaaactcaccacgggaaatatgagatccctgcccagtcgcccacctgcgtgtgaacagggctggagggaagggcacaggggcgcccggagctaagatgtggtgcttttcttggttgtgtttttctttcttcttcttctttttttttttttataaaagcaaaagagaaatacataaaaaagtgtttaccctgaaattcaggatgctgtgatacactgaaaggaaaaatgtacttaaagggttttgttttgttttggttttccagcgaagggaagctcctccagtgaagtagcctcttgtgtaactaatttgtggtaaagtagttgattcagccctcagaagaaaacttttgtttagagccctccgtaaatatacatctgtgtatttgagttggctttgctacccatttacaaataagaggacagataactgctttgcaaattcaagagcctcccctgggttaacaaatgagccatccccagggcccacccccaggaaggccacagtgctgggcggcatccctgcagaggaaagacaggacccggggcccgcctcacaccccagtggatttggagttgcttaaaatagactccggccttcaccaatagtctctctgcaagacagaaacctccatcaaacctcacatttgtgaactcaaacgatgtgcaatacatttttttctctttccttgaaaataaaaagagaaacaagtattttgctatatataaagacaacaaaagaaatctcctaacaaaagaactaagaggcccagccctcagaaacccttcagtgctacattttgtggctttttaatggaaaccaagccaatgttatagacgtttggactgatttgtggaaaggaggggggaagagggagaaggatcattcaaaagttacccaaagggcttattgactctttctattgttaaacaaatgatttccacaaacagatcaggaagcactaggttggcagagacactttgtctagtgtattctcttcacagtgccaggaaagagtggtttctgcgtgtgtatatttgtaatatatgatatttttcatgctccactattttattaaaaataaaatatgttctttagtttgctgctagtccctggttcatggtgaggtttcccttctctgtgtgtggagagactacaggacactttctccctttgctttttaagcaaattctggggttgtgcttctagccagagagtactggttatctgtataaaattgcagatcagaggattccaagattggaagaatcattcacttgtgagtttctgaggaactgcagtcaggcaatgtgtgaagttggaagtcgtttctgtgactgttggtagctggacatgagggcttagttgtagacacacatcaccaaggagagcctcaccactaagcgtggacccactcatgagcctggattagccagttttaatatattcagagagtagagccaaccgattaggagaattaaatcatctgtattcaattgacctgctaggctcaaatggtacctagacagagctgtatacatcagcccaaagtgtgctggctttgcagtgactctgaactatgaagacatttacaaaacagattatagacctggacgggataaaatacctgctaagggtggcgaatccttaagaggaagttaagcagctttggaacttcatggtacttggttcttctccagggtttcctgttagaactgggtagctgtaaagaactgccccaggtctgctggtcaaaggcacagctacactcaagttccagccagaaggaagcaagggcacagtgcagtcctactgtggtgaggactctattaatataaagcaagccaagctgcccctggggccatgcttttgtccagctccaagttaaacaaggagctctggaaaacttggagcatggatgacacgcttaccaacgaggaggagagcctggagctagtgcagtctgttttctgaagagggtgttcagaacttcagcctggtaaacataagatcacccatcaacactagggctggaaacaggcttacattggctttgaggggctactgcacttggccgtgaatatttgcagggcacaggagcaggcagatcggtggtttgggatcaagtttgacaaacggaggaaacaccagctaggtaggcaaagtaaaagaatgcaagatcccaaagagctttcagtgcattaaaaaagaaggcagaaaagcttcagaaatgcccccaaataaaatttctttgttgattgttttcgcctagtcccccaaaagactacatagaaatattgatgtctctgtgcatgtatgggtatagcgtttcctttttgtcactcttagggaaaatgaaaataacatatttggaatagaactttcaaaaagtccagaagggtaacattgtccggatgctgctgtgagccacaaggctagatataacacaaagacatttggttctaaaattcctggactacagcagcttcagacctgcccatgctcaggtgtgtaggctcgaaaatgtggtcccaaggaaagtcatattcaacaacatacctaagagcctttgttgttagttatccctgaatgtgtctcactgtggatccatcccagaaatgactgatcttgtttacgaatgtgaagggattgtgacatgtggctgggttgggcgcagctgggtgagtttaacagtgagcagtgcaaggagcagctgtagagcttccaagcaaaatgctccaaggtcttcctctccctctctctctctcttcctctctctctctctctctctctctctactaagctgaaatctgaccctccctcacatacagacagtgagttttaggagaagcatcaaggccttaagtcagaaagctgggaaaaaaaagaaagaaaagaaagaagggagggagagagggagggagggaggaaagaagcaaggagaaagaaagacaggcaaacatcactagtgaaggaaggaaggaaagaaggaaagaaagaaagacaggcaaacacatcactagtgaaggaaggaaaggaaggaagggaggaaagaaggaaggaaggaaggaaagaaagaaggagaaagaaagaaagacagccaaacacatcactagtgaaggaaggaaggaaggagaaaggcaaacacatcactagtgaaggaaggaacgaaggaaggaaggaaagaaagaaaaagaaagaaaaaaagaaagaaagaaaggcaaacacatatcactagtccttagattctctttagctcagtacagggtttccaaaggaattgttgacagcattaatttggagatttctcagcatctgtaccccacggccttagttttagaaaaatggcaacctgttttgcatggcagtggtggagtcatagaagaagcccaaagaagtagattgtccaagatctacatccattcatccctcccttccttcctccagcctccagccaatcaccacccaccacatgctaaggccgagaaacagaactggtacctggtctgtgtgtggttttgcagtggacaggagagacctgcatggcacatcttatatgcgcctctgtgaggcatcagggcaggaggcccaaaagtagatgtatttccacagggcccctaaatgcatacaaggcagaagattcagcctatgtgaggtcatagcaaggggaagctgcagggtcatatagaaggcaagagaagttatcaacagagcatcaaaacattccatcgggacccagactgggtctggctcatgatcccctatgtaagcccacaccttgcagagggctttggacgtagtaagaataactacaataatagcaatggctgtgataatagtaatcgtagcagcacagccttgagaccacttgctgtgtgctgaacaggctgctgggactatctcagtgaatcctcaacgcattcagggaggtactgtcatcagccccactttacatgtgaagaccctgacacagagaggttaagtaaattcccagggtcacatgacaactaaaagacccagaacaggaactgggtggtctgataacagatctggaacccccaattcagtaagcaattgttgaataaatgaatgaatgaacaatagctgaccactttacatgcattaattcaatcctctgacaaactttggtggtactgctctcatgctcataatattacagacgaggaatttggagcacagagaagttgtgtcacttacccaaggtcacacaggcagcaagcagagagtctggcatgcaaacctgggctgtgggactccagacctgcacctctgaccacgaggctttcccacgtctctggtttctcaggacttgactaaatcatttcatcttcacagcagcactgctgcacctttattccaagcaaaaggggaacaaggttgcatggcaaagagcaaaagccacttggccagtgtgggggagcccaagggaggaggccgtggcaacctgcatttttgcagcagtcgcgagggtgctagcagtggggctagggggaagcaggtggatggagaggtccttagaaggtagaaccaggattaggttttatgtagagagggagcaagaaggaatggtcagggaggaccacaccatttctgactttggtggcaaagtgacattcatcaagacaggagaaaaccaacagaggacaggcagtgtgatgggaagcaaagatgagtgcagtgtggattatttgccatcgaggtgtctgtagagaatttgggatgaggtcatggtcacaggcgggtgtttgaaatggtgagagttggagctgtggttaacctcaggaagcaagtgggtctctccagggacagaggagggaggagggcagacctcagggccaggtgaacaaagaggaggttgcaaggggagctgtgactgggagcagccccttaaccacttgggcgctgggtgcccatttttactataagaggattggcagaggagattatgcaaatggccttatccaacgtcaaaatacgtgatccggatagcgctaagggggaatgcagcaagggtcttacaggagtgacttaggaggatccactcctgcccgtgataactcagcctctgtatctttaacttaacccttgggctacccgagcaaaattaaaatcagctccaagagctcatagttttaaattctccactagcatctttggggatgctgtttcaagacagagaaacagaagagaaaaatcaagaagtattcctgaggccatagatattatcctacattctagattattttctcagaaggaggagaaagaaatacagaaaacgataacagattggagtgcaaactggcatcttacacttaaaggatgtgcagatataaacatcgtttaggactgaactatatcttgccttctctatgagctggtttttagtttgactcaaccacttacacattgcttcaccttgagcaagataccagaactttcctgcctctgtttcttcatctgtaaaatgggcatgataatggtacctatctcactggactgtcactcacaaatagctcatgcttattgaacaagtattacatgctcgattgctttaagttctctgtgtttattaattcatctactcctcacaacagccctaggagagatggtacgagattaaataaaaccatttgtgtgaagtacttggaaggctgcttggcgcagagcaaatgctcaataaagtgatctatttttatgttttttgtccctccccccaaagaaagttaaatcctgtaagctaatgagtagggctctttaaagaaaatgagtttttttcttacagaaacactttttccaatactgtgttcaggttccacagaaaacccactgatctttcaagtttaaaaggcaggcacagagcctctacagcagtgaaaaatattctctgtctttccctttgaacacaataacatcacagctgacttcccaggaaatcagacctcatgcacggacacctctatacgcaaatggataaagatggctgtaatatggaaatgcagagaaacggtcagacttcagggaagctcgcgaaacacgtgcaggcagcatagtgtggggtgttttttaatgttttattaagagtgtgaaggccaagctggagggaggagggaaggagacgtttgaaatctgaaagaataagtttcagctgccgaggtgagctgtcgtaattggggacactcctaggaaaatgacactgttggatcccacacaatgtccgcagcccatccggacttccccaaagtcagtgcctgtcgctttgttattctaagactttctgaatgtttctgtttttatatacattgtttggtaccaggctgccctccaggggcctttggtttataggaagggattcataacagcaacccttgccacacgcccatctccttcccagatgctgggggcttcaggggttctgtagatgggatgggatgttcccaggtggtctcttgcaacagatgtcctcaaaggatgcaatttgtggcattttagggaatacttgcacttaaaaaaacatctaaaacctatcctaacaatgttttaagtattttaggcagaactacaaagtgatcgaccttgacatgatgaatcaacacccattttccaagggggcgatggtgatcgggagctgcaggtgctgactttgatcagaactgacaagctcatggggtggtgcagctctctccccaccccagccctccccattccacccctgcccccagggcagcagcacctgtttacctcccatgctctccctgcactattttcgcctctcataaaacacttggatgttgttggctctgaataagatcattcatctgcgaactgcctctcttcctgcagctcatctgaaacagtcttattgaacttgggtcaatatcacctcggtttctttggattccaggatcacagcagaaggctcaaatttgaactaaactcagaagcattttaggtcagcaaaactttttttttccccaagagactttaagtattaggaatctaagtgccaccttacttttccacacatggcacagggtaaagagaacatgagatagccatgaagaagttgtgattctgatttgctatcatgatgacccaggtctaagaagacagaacaaaagcaatgagaacaagagaacacggccaattataacatttgacattcttccatggcagtcatgattgtaaccattttcaattaaaagaaaaaacacaatactacagcaatgttctgagctgaatcttatctcttgagtaaacagagggcctctgagcaaaaaaccatgcaatagaaaggaggcatcaaaagaagttggaaatgtagtatttttatttttaactcacctctaccttctaaaagctttattctttccaagacaaaaagcttcacgcatgtcccaggggatgagccaagaaaaaaaaaaatcaggtaaaataatccctctgggtcaggggcgtgcatgtcactcggtctggtcagtgagatgtgaggggagctttcctagtgagacaaaaaaaaaatgagggtgtgcgtgtgggagtgaaggaaggttctaataaaagattttgcttcatgataaaaaaaaaaaatgatgaggaaacctgtccttttcttctgcacacaatgtggtgtgtgagaatcacatatggagctattgcaaccattttgtgaccacgaggcaataagcccaacaccaaagccaaaattctgagatggcaggtaagcaagacagagccagcctcgtgagcactcattaagcgactgcacccccaggattcttgttatgccaagtagccaacactgcctggatcccctgagagttgcaggttgggtgttctgtgcctcttaggaaaatacacctgatgtggcaaatgagtcccaggtgtctcaaaccctactgtgcacacaaatcactggggctcttgctaaaaggcagctcctgattccttaggtctgggtgggaccccaaattctgcatttgtaataagttcccagttgatgtcgatgcttctggtgctcctgacccctttgagtgaagaatctatttggccacccaccagaagttcagaacgaccccacttactcctggctgtaattatatgaacacatcttgggcatcacttcctgggtgtcctgtagtggactagctgtcaattaaaacaatttcttatgttgagttaaaatttgcttccttgtaactattttctattattatctctacttttgccacatagagcttcacagagcaagtctacttgtttttccatgggaaagccacttatatatgggagcttatcacaaatgcagaatttggggtaccacccaaacctactgactcaggagctgccttttagcaagagccccagtgatttgtgtgcagagtagggttcaagatgcccaggactaatttgctatatcaggtatattttcctaagaggcacagaacacccaacctgccaactctcaggggatccagagagtaatatgtgctccctggatctttctttttattcttaaaactgttgcccagataacttggtttcatcttgctggctgtcccctgaatgtgtttaccatggtctcaattcttgtcaaggaagaatgtgcccaagtaaagacaaatctccaggaagcatctaacaaggagtgggatcattagacacccagcaaatgttatacaagataatgggacactaaaagcatttttactaaaaccagagacaaaacaaggctatctatgattactggtcactacccggaacatgattaaccctgaagtcagagaagaggaaagaaaaaggaaggtaaaaccattggaaactgtcattatttgcagctgttgtcattgaaaagtgacttagctggaaatagaattgatgagattttcataaggagaccaggacaaaacatagctacaaaaatcaatagcatcctcatgcaccagcaggaaccagttgaaaatatgaagaaaatttaagatcacttatgcaatgcctacaacaagcacaaactatctagaaattaacatagggggtgtgcaagccttttggaagacaatgtgaagatgttactgaagagcataaataattggctcaaataattggaagctcatgtcatgtgcctgtaaatatgtcaattatccccaagttaattcctaaacataatgcaattgcaactttaaaatatgtatttctgtggaactccacaagatgatattaaatccataaaatttgagcagtagtcaaggaaaaaaccctggaacagggataagaaaggacataatctatcagtgaagtacactgtgagtctgcagaaacagacagcatgggccaagtgttaaaacagacaaaataatggaacaaaataggaaatccagaaagagtctcaagtgcatttcaaataaataagaaagaatggattacgcagtcaatactgttgaggcttagtttagatgtggggaaagtaatattccatccccacctcatgcctttcaccaaaatacatgttggattgataaaacatttaaacataaaaataatacagtaattaggggaaaatgttatctaaagttttcattcaatagaaagaaattacaggtaaacattttttataaacttatcaggaaaatgtcttcttagcatgacatcaaagctaaagccattttttaaaaatcataatttcactacataaaaatgtaaaattctgtaatgtaagaaatcagttaatttaaaaaaaattgcaaaatctccataaacaaaattaaaagacaaaaacttaagtttcttgtctgggtctatgagtaggcaattcaaattagaagaaatgctagtgacccataaacctgtggaaagttatttaagctcacttctaataatccaagggtgcatgcataaaaaaatgattatttgtgcctaacaggtttccccgttttttttttctttgagacagagtctctctctgttgcccaggctggagtgcagtggcatgatctcggctcactgcaacctctgcctccccagtttaagcaattcccccgcctcagcctcccaagtagctgggattacaggcgtccaccatcatgcccgtctaatttgtttgtattttcagtagagacagggtttcaccatgttggccaggctgcttttgaactcctgagctcaagtgatccgcccgcttcggcctcccaaagtgcgaggattacaggtgtgagccaccgcgcctggccagcttggtactttttttttttttttaaagcggataatacctggattttgctcaggcatggagaaatggactccctgtatcacagagtggaaccataaagtagctcaccctttctggagaacaagtgtgatgtgtacctagtgccgtttgcagtatacatgtcctttgacccagcaattccacttccaaataaatgttgtattgaaaattgggaacagtctaaatatataccggtaagctgactattcaagccaattatggaaaatccttaaaatagagtaacatgtagtcattaaagtaattacgtagaaccgtgtcattaacatgggaaaatggccacacggcactgctaagcaggctgatcttcagacaggacggaccagggcagcccttccagtttgttttgtctggtgtgtttttgaatttgtccacacccctatgccaaatcagttgttgaacatttcaaatattgccctgttgttactacacaaagcaagttatataattcctgaataagacaagcctgggcaacacagggagaccctgtctcaaaaaataaaaagaaagaaaaggaagagaggagggaaaggaaggggaggggtggggaggggagggaagggaaggggatggggaagcaaaggaaggccgggtgcagtggctttcgcctgtaatcccagcactctgggaggctgagtgggcagataacttggggtcaggagtttgagaccagcctgaccaacatggtgaaaccccgtatccactaaaaatacaaaaattagctgggcatggtggtgggcacctgtaatcccagttattcaggaggctgaggcaagagaattgcttgaacccagaaggcagaggttgc

SEQ ID NO: 256 - DNA, 3254 bp, Homo sapiens
tcgaaacagctgccggctggtcccggccgaggccggcgcagggagggaggagccgcccgggctgtgggggcgccgcgagctgggccggcctcggtgtgcccgcgccgccagcccgctccagacgcgccacctgggcgctccaagaagaggccgaagtttgccgcggccgtgagttggagctcgcgccgggccgctgcgccgggagctccgggggcttccctcgcttcccggtattgtttgcaaactttgctgctctccgccgcggcccccaactcggcggacgccgggcgcggagagccgagccgggggcgctgtgcacagcgctcgggccaggccgggcgggcatgggcgggggcccgagcaggggtggagagccggggccagcagcagcccgtgcccgggagcggcggcgctgaggggcgcggagctccccgcgaggacacgtccaacgccagcatgcagcgcccgggcccccgcctgtggctggtcctgcaggtgatgggctcgtgcgccgccatcagctccatggacatggagcgcccgggcgacggcaaatgccagcccatcgagatcccgatgtgcaaggacatcggctacaacatgactcgtatgcccaacctgatgggccacgagaaccagcgcgaggcagccatccagttgcacgagttcgcgccgctggtggagtacggctgccacggccacctccgcttcttcctgtgctcgctgtacgcgccgatgtgcaccgagcaggtctctacccccatccccgcctgccgggtcatgtgcgagcaggcccggctcaagtgctccccgattatggagcagttcaacttcaagtggcccgactccctggactgccggaaactccccaacaagaacgaccccaactacctgtgcatggaggcgcccaacaacggctcggacgagcccacccggggctcgggcctgttcccgccgctgttccggccgcagcggccccacagcgcgcaggagcacccgctgaaggacgggggccccgggcgcggcggctgcgacaacccgggcaagttccaccacgtggagaagagcgcgtcgtgcgcgccgctctgcacgcccggcgtggacgtgtactggagccgcgaggacaagcgcttcgcagtggtctggctggccatctgggcggtgctgtgcttcttctccagcgccttcaccgtgctcaccttcctcatcgacccggcccgcttccgctaccccgagcgccccatcatcttcctctccatgtgctactgcgtctactccgtgggctacctcatccgcctcttcgccggcgccgagagcatcgcctgcgaccgggacagcggccagctctatgtcatccaggagggactggagagcaccggctgcacgctggtcttcctggtcctctactacttcggcatggccagctcgctgtggtgggtggtcctcacgctcacctggttcctggccgccggcaagaagtggggccacgaggccatcgaagccaacagcagctacttccacctggcagcctgggccatcccggcggtgaagaccatcctgatcctggtcatgcgcagggtggcgggggacgagctcaccggggtctgctacgtgggcagcatggacgtcaacgcgctcaccggcttcgtgctcattcccctggcctgctacctggtcatcggcacgtccttcatcctctcgggcttcgtggccctgttccacatccggagggtgatgaagacgggcggcgagaacacggacaagctggagaagctcatggtgcgtatcgggctcttctctgtgctgtacaccgtgccggccacctgtgtgatcgcctgctacttttacgaacgcctcaacatggattactggaagatcctggcggcgcagcacaagtgcaaaatgaacaaccagactaaaacgctggactgcctgatggccgcctccatccccgccgtggagatcttcatggtgaagatctttatgctgctggtggtggggatcaccagcgggatgtggatttggacctccaagactctgcagtcctggcagcaggtgtgcagccgtaggttaaagaagaagagccggagaaaaccggccagcgtgatcaccagcggtgggatttacaaaaaagcccagcatccccagaaaactcaccacgggaaatatgagatccctgcccagtcgcccacctgcgtgtgaacagggctggagggaagggcacaggggcgcccggagctaagatgtggtgcttttcttggttgtgtttttctttcttcttcttctttttttttttttataaaagcaaaagagaaatacataaaaaagtgtttaccctgaaattcaggatgctgtgatacactgaaaggaaaaatgtacttaaagggttttgttttgttttggttttccagcgaagggaagctcctccagtgaagtagcctcttgtgtaactaatttgtggtaaagtagttgattcagccctcagaagaaaacttttgtttagagccctccgtaaatatacatctgtgtatttgagttggctttgctacccatttacaaataagaggacagataactgctttgcaaattcaagagcctcccctgggttaacaaatgagccatccccagggcccacccccaggaaggccacagtgctgggcggcatccctgcagaggaaagacaggacccggggcccgcctcacaccccagtggatttggagttgcttaaaatagactccggccttcaccaatagtctctctgcaagacagaaacctccatcaaacctcacatttgtgaactcaaacgatgtgcaatacatttttttctctttccttgaaaataaaaagagaaacaagtattttgctatatataaagacaacaaaagaaatctcctaacaaaagaactaagaggcccagccctcagaaacccttcagtgctacattttgtggctttttaatggaaaccaagccaatgttatagacgtttggactgatttgtggaaaggaggggggaagagggagaaggatcattcaaaagttacccaaagggcttattgactctttctattgttaaacaaatgatttccacaaacagatcaggaagcactaggttggcagagacactttgtctagtgtattctcttcacagtgccaggaaagagtggtttctgcgtgtgtatatttgtaatatatgatatttttcatgctccactattttattaaaaataaaatatgttctttagtttgctgcta

SEQ ID NO: 257 - protein, 579 aa, Homo sapiens
MQRPGPRLWLVLQVMGSCAAISSMDMERPGDGKCQPIEIPMCKDIGYNMTRMPNLMGHENQREAAIQLHEFAPLVEYGCHGHLRFFLCSLYAPMCTEQVSTPIPACRVMCEQARLKCSPIMEQFNFKWPDSLDCRKLPNKNDPNYLCMEAPNNGSDEPTRGSGLFPPLFRPQRPHSAQEHPLKDGGPGRGGCDNPGKFHHVEKSASCAPLCTPGVDVYWSREDKRFAVVWLAIWAVLCFFSSAFTVLTFLIDPARFRYPERPIIFLSMCYCVYSVGYLIRLFAGAESIACDRDSGQLYVIQEGLESTGCTLVFLVLYYFGMASSLWWVVLTLTWFLAAGKKWGHEAIEANSSYFHLAAWAIPAVKTILILVMRRVAGDELTGVCYVGSMDVNALTGFVLIPLACYLVIGTSFILSGFVFHIRRVMKTGGENTDKLEKLMVRIGLFSVLYTVPATCVIACYFYERLNMDYWKILAAQHKCKMNNQTKTLDCLMAASIPAVEIFMVKIFMLLVVGITSGMWIWTSKTLQSWQQVCSRRLKKKSRRKPASVITSGGIYKKAQHPQKTHHGKYEIPAQSPTCV

SEQ ID NO: 258 - DNA, 80276 bp, Mus musculus
  misc_feature (1)...(80276): n = A,T,C or G
gtttgaacttcaggttactggaaatgaaaatgacatgcacatgtgtgtgcatgcatcatgcacacctatcagaaagaagagggagcaaatggttttttttttgtttgtttgttttttgtttttgttttagttaaaacaccatgcctagctaataaaaatctcttgataggagaaagggtctgttggttaccatgtggcatggccattgtatctgtaagagaaggatactgtagcccctccctagaacagccatccctccagtatgccagtcttctcctggttcactgcacaatagctttctgactttaccctttgccatcttcctgtctctttattttgtttgaaaaatacttatttttatgtattctttgaaagttccatacatgtatacattatgtttgagcatatccacccaacatcacatctctccaatgcccctacaacaccccactctgtctgcacccaactttgttgttgttattagtcctgcattcaggtcaattagtgttgcccatatggacgtggtatgtgacatcatcatacattttggtgtggggactctaccatcagcatgtggctagagattgtccctctttcggcagccatcaattgccagtagcttactcaccaaggtggcattttgacaggcttgttctcatctagatcttgtacaggcaaccacggctactgtgagatgacacattgcctcatttttaaagatagaatcgtacactatagccaaggctagcctaaaacttactgtgtgtgtatgtgtgtgtgtgtgtatacactcatatagctagacttgaactatcaacaattggatcttacactatagatgaggctggcctagaacgtactacatattgcaggctgagcttgaactatcaactatcctctagtctcagcctcccaagtgctggcattacacacatgagccgtcatgactagcttcccttcgttcttagcacatcccatgagggagcatcttaaagggcccttgacccttgcacacctcattagatacctcatttgtttccctgagtataatgaggtcttaagttgaacctggacatgtggtccaaaacgcttattaaatcagattactttctcacactattagacaaggaaatctgtgcagacaaattttgtgtctatgatatgaagaatgtccacctgcaggagacattagcagtgtgactattgattgtgaagtagttcgcctaagaacagagggcagcagacacaggaagcagcaaggaagggaacaagagcagacaaagaatgaaagcaaagatgccctttctccagtcctcccgccctcgagccccttgtttgagcagcttttgagaagggttgttttttgttgtttcttcttctctttgtttttgttttgttttgttttgttttcatagactcttgcctgctgaggaccaggctaatcatacactactatgccaggaggttttttgttttgttgttgttttgggttggattttgtttgtttgtttggttggttggttatttttgtttgcttgttttggtttctttgtttttgtttgtttgtttttgtcacctttgaggtttctctttaagcagcctgctgaagatcagctctagagtcttcagctctagagtctcctggacagctctgttctcatcggaggacctggttgaagacagcatcagagatgctgttacaaccagcactgaagctaacaatgaagaggagcagtggcgagtgagagacacccagaactagacaattctgtgcagccttcaacagtccactccctgggcaccagttcccctacttggaaatgagagggatgagggctctatctgtctgggttttaacagtagaatggtggatatgttcaaagcaggtggaactatctggcagtgttttcacctctgtggggctcagcctgtgtttctgattctctccttgggaatggcagttaagtggcaacttggtaacactactgctctgggatggtccctgctctgggatggcccttgctagatctctgtggttgtggttggtgatgtgggaggcaggaggaagtggatggagacaagctgaccattggtttgaaggtccaagcttttaatccccttccctacctgtgaggagagccaggccaaactgaccaggccttgatagccattccccagccagccgtgccctccctggttgacatcatctttttctcctctctagcccatagaagccaacgcagcttccagccaccattcgtgcgtatgaccttgcaccctgacttcatttactgaagatatgcagagtcaccatcaggaataaggagaatttggggtctgaggaaaatcatcccaagcttgggtggggtaaaaataccctgtggattgaaccctaaaaaagttcctcaaaaatgacatgacgtttttctgccaattaaacttccctaaccgcttcctagaaaaggcagaaattcagagaagttgtaaggcaccagaggccgaccagatcactagattctcccctttcagccttggaaaaatcatccactttattaagggcatctttaagacccatggacaggaaaagcctccagacatttgcctacccatgaactggccatcagccgacagggtttcccacagctgcaccctgagctagtgcagcagccacagccttccctgtgccatcctacctgctgccaagtcagtctgcagacacacagcctggcaggatggactggtcagaggttcaaagttgcttgtgcagagtgtttccagctgccattgatttgttaggcgccgtgtcagaagcaagtcaaatggtcgtgacttgtagtagtagattaaataaattgtggtgttcccagacaggaaaacctctgtcagtctcaaaatacttatagggactgtattaactcacagggatctatgtccacaatgtatttgctattggttccctaaagtgccttttaacataatggtacttagaagggcatctctacagatatgtccggataggcacagagtgcctgccaactatgcctgccaaaagccagagagcaattatctggaggtttactctttactgtcttctttataatatactctttttgtatcttaaaatattttttacaatgatacattgtttcattttgtgccaggggtgggggtggggagctatactttcagttttaaaatttgagttaagtcaatgagctaaatcactcatatttgagagatgtgacctgggttggttgccctataagactaaaagccacatagaggacttcttgtgtgccagccaacggtgtctgaggaccttctgggatcaacttgcgttacctgtacagtagctccaggaagcaagtcttttatgatccacatttgacagatgatcaaatggggaattagagaagtcatttgtctaacatctctggctgacaaggggtgaaacagagctctatctggtcaaaggcctgcttccaaagcaacggccaccatgccgtatctttggcttacagcatcaattcaccggttctgcatgcatggggcacggaagggaccgagagctgagcaggagctagggtcacggggtcacgggtggggagaaggcagaagtgaaggctgtggattcaaacagatgaccctgcgggttcttggggtcttgtgggcctcctgttccctcggttccccccacttgtgcttcctccgtcgttaacagggcatcgtttcaggcactccatttagaattaattagttgctatggctacctacctagtagtgagtcatgtggtaccacttcactgccctactgtgtccactaacaccttgttccaggccaagatgtagggagaagagggattcctatgtgagggaagttctgagtgaatgtgtgtttcattatgggcatagcctgtcaaggactccaagaccaactggcccatgggaaactggcaaggctttcctcgggagtctaggtatgagtgtttatgacgagaggtcagtgtgtgcagggattagtaactgcagcttcttcctcctagacgtttacagcctgaggctagtcatctgcagagaccttctaccagactagccagcacctcccctgtgctgtaccttataaaggttgcaggtactggccatagtggtggattagagaaccccgcctgatcccagcttcacagtacacatatgtactttcttcattccctgggtgcccttagtcagagttctgcgacccaagctgagcccatcacccccacactgagacacacagaccccagggtctctgggtagggaagctgtcccagaaggctggaaggtacacaagcgtcctcatctctcaccaccctgtggcaacgctgttcatttgtcattgtctattgggcataagcccctgaggctgacacagttgccttgtggaggcctgtatccccagccttggaagagaacactcagtaagagaacatcctctgttgataattggaagttattcacaagaggccttgcaattaaagtggcatttgtgaattagctcgtaagatttaaaaaaaattttttttctgttttctacttacctggctcagagttctgacaccaagaagttgctggtttttaatatgtaccttaaaccagaggggccagtagtaggccctattttatactagatactcgagtgaagaacttctaggtgttctatgtacattataggctataattcacaaagccctgtgttggaggccagggctctgaacagtcaggccacacagctagagaggggtgaagactggcttctgtctggagctgtccacactaatttccaccctgctccctcctcttgagttgttatagctttgaagaacaggcctgttcttaactctgccgcctacacccatgagagagcaatttaaatttaaacggcattctcctcttctattgctggattggagactaccacatgagctctccagatagtagagagagagagagagagagagagnnnnnnnnnnnnnnnnnnnnnnnnnnnnnnnnnnnnnnnnnnnnnnnnnnnnnnnnnnnnnnnnnnnnnnnnnnnnnnnnnnnnnnnnnnnnnnnnnnnnnnnnnnnnnnnnnnnnnnnnnnnnnnnnnnnnnnnnnnnnnnnnnnnnnnnnnnnnnnnnnnnnnnnnnnnnnnnnnnnnnnnnnnnnnnnnnnnnnnnnnnnnnnnnnnnnnnnnnnnnnnnnnnnnnnnnnnnnnnnnnnnnnnnnnnnnnnnnnnnnnnnnnnnnnnnnnnnnnnnnnnnnnnnnnnnnnnnnnnnnnnnnnnnnnnnnnnnnnnnnnnnnnnnnnnnnnnnnnnnnnnnnnnnnnnnnnnnnnnnnnnnnnnnnnnnnnnnnnnnnnnnnnnnnnnnnnnnnnnnnnnnnnnnnnnnnnnnnnnnnnnnnnnnnnnnnnnnnnnnnnnnnnnnnnnnnnnnnnnnnnnnnnnnnnnnnnnnnnnnnnnnnnnnnnnnnnnnnnnnnnnnnnnnnnnnnnnnnnnnnnnnnnnnnnnnnnnnnnnnnnnnnnnnnnnnnnnnnnnnnnnnnnnnnnnnnnnnnnnnnnnnnnnnnnnnnnnnnnnnnnnnnnnnnnnnnnnnnnnnnnnnnnnnnnnnnnnnnnnnnnnnnnnnnnnnnnnnnnnnnnnnnnnnnnnnnnnnnnnnnnnnnnnnnnnnnnnnnnnnnnnnnnnnnnnnnnnnnnnnnnnnnnnnnnnnnnnnnnnnnnnnnnnnnnnnnnnnnnnnnnnnnnnnnnnnnnnnnnnnnnnnnnnnnnnnnnnnnnnnnnnnnnnnnnnnnnnnnnnnnnnnnnnnnnnnnnnnnnnnnnnnnnnnnnnnnnnnnnnnnnnnnnnnnnnnnnnnnnnnnnnnnnnnnnnnnnnnnnnnnnnnnnnnnnnnnnnnnnnnnnnnnnnnnnnnnnnnnnnnnnnntctttctttctccatctgctgctacttcagtctttcaactagaggagatgggtgaaggaaggggagagagagagagagagagagagagagagagagagagagagagagagagagaactgcaatcagagtgtggcctgtactgcaatcaaattgcaaacattttcatccaaaaatggagccaggtgccttttaactgcctcccccagtgctctccgacactaagctgtagtccggtatcctctgtctctgtgtgagtttgtcgactccggatgcttcatagatacgggattatataacgcatggcttagtgcctggcattgtgaccatagaatgctttcaaggtgcattgacatctcacggtatcatatcatcacatcatatgccgctgtgccacttatcctgaggactcaattatattccatcatacggagtactgtgctttatgcagtgctgtttgtggtactgtttgtgggtacttaggttgtttccacttttggactatggtgaataatgctgccatgaacactgacgtagactgtgtgtggatatacattttcacttctcttgtcatgtgtacattgctatgcctagaatcttaggtcatactggaggcctgtgctatggtctgaggacctgacacagtcagttccagctaaaattccaatcctgtatctattcaactcatgccttctcccaaagcaagctaagctcctggctttcccgcctcagagcagaaaagagacgtggccaccttagcttggttccaactgcaatcagtagccttagaatcctgtcttcctatgccacaggcgtccagcctttctgcatctccgtgatccagacctgggagcaaaggtagtcccatttccttcatccttatgaacaccaccatctcccattacacgcatgcgcagggtggtaaacttcccacctttagaaactccatgcaccaaacctttgtaatgcatccagtgtcaatgcatccagcatcctgtgtccagaatcctgtgtcatgtgtccaatgtcctgcgtccagcaatcctttcttctgtccaggaagagggggaaagaggatgacacatgtcttctctaggcttctagaaacttctacctgtcacataaatccactcctctatttttcattgttgaagtccaggagtcaaatgcctgacttcgtgcttgacctctgacaaccccttcacccccaacccccccacccccgctctgaagaggcctttctgggggaaggagatctgacttaaatttgacaattttgagttcagtaacttgccttttggccaggagtcagagccttagttattctctgttcacggtgcagaggggtgaagttggagtggcaagtacttcataaagccccaccctttgcttttagagctcttgtctgtgaatgagctaaaacctctacttgggtcctgaaatgaacatctcagctgctttggacagagcttcagtctacccttccccccacctccctccttcagtggggatcctgatggaattccaagcttctctgtatcctgaaacagaccggcctccagttcctgggctgtaatacaaggggccagtttccaggcagatttccctgtccccagctgtgtatgtccttctttctacccacaagtccctatgctccagaggaggctagccattactcccttctatcaggttccagataagcccatacctgaatcttggttgtagactttgggaaaggtgagaggacctgttctaaagcagctgcaggcttctcttaggtctcaagccttccccagcccctgccctttgttatttctccaaagccagtccagtcagagtaggcacaacacaacagtcaccacagtgcatttagaagaaaatgtcttagggagagacagaaatgggcgtgacatagcctctctttactctgtctctgttcataatggaagcccttggtaattttgtacacttaatgagatcattattatgcatattataatagtatgttttctgacctaatttgttgttttccattaccaatatatatacaatgttagaaggatctactgtcctctctgtctctctgtttctgtctgtctgtctgtctgtctgtctcgctccctccctccttgtcagagacctttgggaacaaagaaagagcttatgagtgtttataatgtaagagatttcacagttatttgtagtttaataaataaagacataggagccctttgctaagttcttaaaatgttttctcggttttgtttgatatctaaccataatctccattactcttcttttaaaagttacttctatagatttaaaagagtaatatgggttcatagcaggcagaaaatgcaatataaggtggaaaaaaagagcaactgcataccaaccacaaagccaccttcttgtcccccatcccgagaaacactctgtggagagttctgtagctgcccctctggcattttttttctctttagatacatagctttccaagcaggccagcatgcagagacggcagcttgagttgctttggctgtgttgtaaagacacttgggctttccttgtttcaaactagtccaggaaaggctggtgggtgagcagccactggagcaaattcaggcctaaagagtggttcttctccatgcttcgctcctggagggtgggctgaggatcccacagatgctaaaatcccagagccacacagagactgcatctcagagccacgagtgggaggaggtctgcagaggaaggcctgaagacctcttcccagacagagtcacccttatgagccctccttttttgtagtcgaggcaaacactcctttttgcaatcattacttcttgctcaagtgagagagtaaaataatatatatttttaaacattttaaaagcaagcaaacaagtatagaagaagggccctgcaaaccaggagtcagagagtcagggaggcaaaagcagagagcaagaaaagccaagacctaaatctctcacatcccctacctctcctgcccctgagggttcaagaagtcttaccctccgcatctgcacttactgtagcctttattttaatcaccttgtttgaattttgccctgctcagcttcatgaaatggtggggccacatgggcctgagttccaatttagccatgcagctaagaaaccactgctatatcttgtgctgtatgttagccattccttcttgtgtagactgactttctagattagaagtgaaaatgagataagatactgcagggaattagtgccaggtcatgcccacctagatgctgtagtaaactaatgcccacccccaccctctcaccccaaaccctagtcatagtctagacccagaacttctgaatttacttggaaactaacaatttatagatacaattataattgatcaggctggacacaaatgcaatggctgatgcctttatagagataggaaagggacagagatatatgtacaagggatggggccatgtaaaaatggggtggtgctctacaaagcaagggatgcccaagactgccatgtagctacctggtgggaagccatggagaagttgggaagtgttcttgttgtatttattttctctatttctctgtgtgtgtgtgcatgtgggcatacctttgtgtgatgcacttgtgagtgtgaatatggagacccgagggtaatgtcagagaatcatattccaccttattcaatgaggccaggtctctcagtcagacccggagcttgtgataatggctagtctcattagccagcttgctgtggggaatccctggtacatgtggaccaggggtacagctaaagggcagctgacaagaacaatggctctagggtgcctggcaggtaagcggcttgagagagcctaaagataaaacagaactgttgaaaacaaaaccaaagtatgcttccaggcagcatgctccagttcctcagaaaccattctggtttgaatgacaccccacacccccgctttttctttttaacaggaaaacagcttcaaggatcgtgaccacatcatttttgttccctttgttggatatatcctaatgtcaaatgtggcatatctttgttgtctccttctgtctcccaactagagagaacacacttacggctcctgtcccgggcaggtttggttgtcggtgtgattggcttccagggaacctgatacaaggagcaactgtgtgctgccttttctgtgtctttgcttgaggagctgtgctgggtgctgatgtgagtatgaagtacattgggaacttctcttactttctgggtttgtgttgttgagatgggtgagtctgttgtgctgggggaacactttttaaaaatcctactctgagaaattgtgcttacaatgaaatcattcctaccttccaaagaccaggtgtttcagtgttttttattcttttttttattaggtattttcctcgtttacattttcaatgctatcccaaaagtcccccatacccaccccccccaatcccctacccacccactccccctttttggccctggggttcccctgtactggggcatataaagtttgcaagtccaatgggcctctctttgcaggatggccgacaaggccatcttttgatacatatgcagctagagacaagagctccggggtactggttagttcatattgttgttccacctatggggttgcagttccctttagctccttgggtaatttctctagctcctccattgggggctgtgtgacccatccaatagctgactgtgatcatccacttctgtgtttgctaggccctggcatagtctcacaagagacagctatatctgggtcctttcagcaaaatcttgctagtgtatacaatggtgtcagcgtttggaagctgattatgggatggatccctgcatatggcaatcactagatggtccatccttttgtcacagctccaaattttgtctctgtaactccttccatgggtgttttgttcccatttctaagaaggggcaaagtgttcacactttggtcttcgttcttcttgaatttcatgcgtttagcaaattgtatcttatatcttgggtatcctaggttttgggctaatatccacttatcagcgagtacatattgtgtgagttcctttgtgattgggttacctcactcaggatgatgtcctccaggtccatccatttgcctaggaatttcataaattcattctttttaatagctgagtagtattccattgtgtaaatgtatcacattttctgtatccattcctctgttgaggggcatctggattctttccagcttctggctattataaataaggctgctatgaacatagtggagcatgtgtccttaccggttgggacatcttctggatatatgcccaggagaggtattgcgggatcctccagtagtactatgtccaattttctgaggaaccgccagactgatttccagagtggttgtacaagcttgcaatcccaccaacaatggaggagtgttcctctttctccacatcctcgccagcatctgctgtcacctgaatttttgatcttagccattctgactggagtgaagtggaatctcagggttgttttttattcttaatgagcgtcttcatgaggtaaagaactttctgcattaaaaaaaagtttcactatagagaaaactattcttgtttggggcttaaatttgtttttattaatattgtacagtggtggtggtggtgtgtgccatagcacatgtgttgacctcaaaggacaactttgtggaattgggtctgtctttctgcctgtactttgtagggatggaacttagacttggaaggccttgacccttaccaccaagccatctcaacagcctgaggggggaaaaaacattcttaacattgcctccctctgagttttgaagttaacagtttaataactttgaaactctacttttctacatctgacatctgtgtgtggttatccttttggacagcagccaatattcccatctggcctgtgtttacaaagcaagactctgagagtacactattagagaaagaaagaaacatgtttaaatgataatattccatggttctaaacaattttttatttttcttcatttttaaaaaaattttaaaattataatataattacatcatttcccccccccttccccaaaatcctgtacatcttctgcctcgctctctttcaaatttgaggcatttttttcattagctatggttatatatatttctaaatacaacctgctgtgtgtgtgtatagttttactcatgtgtacgttttccgagctggccatttggtattggataaccagttggcacagtcccagctttccgtagttgcgtatagttcatggtgtagggatgaagccctgagggttttctcctttctcctttgtctcttgttattgtctttcttcagctcacattttggcagttatgctactgagactttatgggtgtaaattctgacattactaggaaatacagtctcacagcaaacaccctggtcatctggcttttgtgatctttctgctccattttctccccttccaagtatgagggcccattaacaatgaacattgctcttgcaatggaaaacttgctctacttacctttattacctgagctcttttcatcaacagactctcttccttgtctgatgcttctgagtgtcttctcttctgtctccatctgcaagtcattccattggcttggaatgcttgaagattctctgagccctgagtgcactggatagtgcctggctgcagtagccattcttgtttgtcaacttgactcccatctggcgttaactaaaaccttaaaatggagggatttttgcttactttgaagtgggaagatctacttctaatctggatctttgaggtaggaagacacacctttaatccagattttaattctcatcaaacctgggccatgccttctcttctattagaagcctatacaagacatgaagaagaaagcttttgctctttgcctgcttgctctcacctctactggcaacctatataaggacatggaagaaggaagttttcctagcaattctatttcttcactagcattagggcctacttcttcagaattccaaggtgtactgaaaaccatctaagtcaaccagcgttgtgaactcatagattctttggacattccatttttatccagacattgttggattatctggatcacaacctgcctgcaagccatatatatatatatggagagagagggagggagagagagaaagagagggagagagagaaagagagggagagagagaaagagagggagagagagagagaaatattcattttctaagttctgttactttagagaacattgactaatacattggccatgaccacaaggatgcattgaatgctgttatattactgttttaatattttttttcagtaaaatggtaggcataccaccagaaataaagtggaatataaaacaagaagtttgattctgatttgaaaagaagatactggaaatgtccccagatattactgaggtaccacaaactgaggtaccacgctttagagttgattagccttacaagatagtttcagtgtgttcttttactaagacagtatcttcagtccccaatattagctaacacttccacggtggaaccgacatctttgtctagccctaaaaccttctgaccttaaagcctcagtcatccttgatgcttctctttttctcacctatatggctgatcagttgccaattgtttcttcaagtgtcctgtgaatggtcttactgtctctcctttctctctcttgcttcccctttctgactctaaacaaagatttatgatgaaacatctagaagacattgattcactgagtggtaaacctccattataccccttctccagttacacacacacacggacacacacacacactgacacacacacacactgacacacatactgacacacacacacacactgacacacatactgacacacacacacactgacacacacacactgacacacacacacactgacacacacacacacactgacacacatactgacacacacacacatactgacacacatactgacacacacacacactggcacacacacatacactgacacacacacacactgacacacatactgacacacacacacactgacacacacacacacactgacacacatactgacacacacacacacacacacacactgacacacacacacacatactgacacacacacatacactgacacacacacacaatgacacacacactgacacacacacttatacacacttacacacacacacttttcacactgttttggcattttaactgttttgggatgaagggcactgcaacctcattatccctctgcctggcactaagcacattgttgtttgaatttgaatttcagaaaccactttgtctgttggcactgccccttcagctttcccatgcctttgcatttctgaggctttttatctgagcctctcaggtgcctactcaaagaactttcaggtcaaatgtctcagagctataaaagccactttaagtcccccatccctaggaagtctccatatctgtagtcagttcacatgatgctggctctcttaacactcatgttacaccagcttctacctgagtggggtttttgaccttctaacttattataatgtctttagcttgcacgggtcttttcctaagtggatcctcttacaagttctccacagtctgatagaaagactcaaaaaagccagtatgtatattggaggagcttggtgtttatgggatggacagttgagatgtagtttgaacttaagtattccatcccattaatagagatgaatacaaatttaataagttgtctgttgtaataatataatatctgtcaccacagatgatgggcagatataaagtcatgcaatttctaaacctaagactgtctgttacctcagaagtgataatggcagtcaatgtgaagaataattgatcatttacaatgtatcatccaagcacccacaagcacttctgtacacttggnnnnnnnnnnnnnnnnnnnnnnnnnnnnnnnnnnnnnnnnnnnnnnnnnnnnnnnnnnnnnnnnnnnnnnnnnnnnnnnnnnnnnnnnnnnnnnnnnnnnnnnnnnnnnnnnnnnnnnnnnnnnnnnnnnnnnnnnnnnnnnnnnnnnnnnnnnnnnnnnnnnnnnnnnnnnnnnnnnnnnnnnnnnnnnnnnnnnnnnnnnnnnnnnnnnnnnnnnnnnnnnnnnnnnnnnnnnnnnnnnnnnnnnnnnnnnnnnnnnnnnnnnnnnnnnnnnnnnnnnnnnnnnnnnnnnnnnnnnnnnnnnnnnnnnnnnnnnnnnnnnnnnnnnnnnnnnnnnnnnnnnnnnccatcactccatacatcccagactccccatcactccatacatcctccagactcccccatcactccatacaccccagactccccatcactccatacatcccagactccccagaccctgcttgcctagctacaaagcagtctgttcttccttctattcactgtacttgacttttgctttcctaactataagggctctaagtacatattcgtttagaggaaaaaaaattggttctcactaagaactccaaggacaaaggtcatatttgcattgcaaagagttttgagacaagtttatgatggaggagcttaaggtatctgtgctggcaagcttgcaagcattgaaaaggaatcactctccaccaatggaaactcttgcttccaagtgggcctttgtcttaagtaagtcttaggataatgattgtctactttgtgactagctcatcctgttgtggccttaacttataggaagttctttctcaagtttctttttatctaaaagaaaaggaatccaacggggagccagactcatgggtaaaaaattgtgcgtgtcatttattatctatctaacaaacttctgagaccttacatgccagtaatgagctgtaagtgatcattataggtgactaggatacactcaggatacaggaaaccacataaggcaactagaaaagggttgtaatgaatgtaaaagagtttaaggcttttaacaagacatatatgatgccatactaatctttaaaaacttacaaagaaactgaggtaaagttaacttacaaagaaactgagataaagttaaaaaaatttatttttacaaagtaaaatgagattagattttcgcaaccaccatgagttcctgttcatggaaagggcatgggtcattatgtgaccgagaggtaagagagaccagggcaggaaaagcattaaaggctgtcctaagaaaaacttgacttgaaaacaatagcacttgtgttttaaaataattaccctggctgctgtattgggaatcaaatgtcagataatgagattaggtagggtcttggaatcctactatcagaaaggtgcagaaatcaccacaggagatgataatgtcccagatggtacggaatctctggggtggtgagaagtgattaggctctgaagatcagtgaagagacagcctataggactagctgatgaatcagacgcagggtgagagaagagtgaagaatggttccaggattgatgctctctgcctcaacaaggctggtgtagagggagccacaaagggggagccagcagtgaggaagatgcactagggtagaatgagaagcaatgagaatcagaattatggtgatgccacaggaaagcagaagggacagggaccatctaagatgcacagtgggcgtagaagcaagagggtgggaggaaagtatggaatgactcctaatattctggcatgtggtggtggtggtggtagtagtagtagagtagtagtagtagtagtagtagtagtagtagtagtagtagtagtagtagtagtagtagtagtagagtagnnnnnnnnnnnnnnnnnnnnatacatttgtaacctcagattttgattgcttatgtgtctgggtttagagtgtgcattcttacccattgcacagactagtaggacaggcatttgcaggctggaaagtacctttagaacagagtctgccccttagtgttccaagaaggcagtgctccaggaaagtccccttgggtggctaaagaagaaagggaagctgagccagtggtgagtggcccaggagcctattcatcactagaactctggctcttgtcaccctgtcactgtccaaaagtgagaacgttggcaagtgccaactactgtgcgtgaagacaataacttttcaagttatgcattttgtaaggaagacttacatggtccagacatgttgcaatcagtacctcaggtctgttgcttcccactttgttcttcccatctctcatccctgatgccatgcaggctgtggcctacgtgaccattaagcaggtccaatctctacctccagctttatactgtctgcccttccacatcttgaggaacttctctgggcactctagcaggcatttcagatctaatggatgttcctagccctctagtgtcctaatgactccatccctaagcccaggaggtctgtatttccttttaattacctatactgtcagcaatgtcctacaggtgtttttttgttttttttttgtttttgttgttgttttgttttgttttcaaaaacatagctctaagaaaatgggctagtctataacagatcaggctttattgctcacacacttcgctgggttctctcctcaaccttatctgaaataccggatgtggctgacatcctgtagttcagtaagtggagactgaagagcctagaaatgttaagagagaatctcttccttcaaaagaaacaagcaaacagacgggagtgggcagatggtgaggcaagtgccaccaacaggcagtgagcgctcagcaaacatcaccttctgaccttacttggttactctgtttagctttgtaaaatgtgaaggggttggacaaagtttaaaagactcggttctccctttcacagcggtaacaattggcaacaaagttctggctggctcggcttgcctctcacatccacaggtctgactggcaggaaagagaaagaacgtcctgctggtgagcgaagaagctggatttggaaagtggtgagacctggagtaaaatccaaggtcaccctctgtgtcctgcaggctgcagcgtgtcctataatcagagtgcctttttttttcaaattattttaattattagaatgtgtaactattagaatgtaaagcttttaagtatgcaaataaaaagtttaaaaccttggtatggtgagatagcctagtgagtctagattcttattgagccagcctggtgacctaagatctattcctaaacctcacacaacatgaaaggagagcaccaacttcataaagctagcttccagatgcataccatggcacttgctcctacacatggctttgttgccaataataataattttttttaatatttcagaatctgaaaaagaaaagaaaactgaaagactgcttttagagtttgaaagacaacattgttgagataattatggaactgctgagtcaatgtaattcctagcaaagcacaccagttccttttgtgcagaatagacaagtctaccctaaaattcatacagaaactcaagagagagaaattcaagggaaaggaggaggaagggccagagggagggggagagagaggacttcagaaggaacaaagctgacggccttacttcctaatttcaaacttttcacaaagctacagtaaacggcactatgtgatgggggcagagaacagacacagacctgagcaacatggatgcaaagtccaggaatacaccccacgtttatcatccaggatgctgggataattctacagagaaaggacagtttagttttttaaaataaatttattggagtatgtgcaaaagaaccttgctcatacacaaaaatgaactcaaaacagattagagacccagatatgaacagaacagacttagttcttatgagaaaatgttagcaagtaataaacacatttggcttattatacaatgcaatatcttcccattatgaaaggaataaagtattgatgtgtgctgcacaacagataaaccttacatcatgctcagtgcaagaagcaagccacaaaaggtcaagggctactcaatgtcatttctatgaaatgtcaacacaagcagttgaccaacacagatggacacctgccaggattctggaaaaaggaaggggaaatgggactatttctgagtgaatatggttccttcttttagtggtaattaagatttgccaaattaaatagtggtgttggttagccaactctatgcatatactaagcagtccaactgaatgaatagtgtgccaagagtttacattaagtttatacggcctgcttttgtgtgttaacaacattttaataaagctgctgaacatttaaaaataaatttaatgaacacatctttaaaaccctccacagatcacgccctccactagcccagcaccctagtgcaaatgtatacagtgccctcctaaggctgcgttgcagctcatccttccaaagcagtctactctctaaccaaagcaccgtcctctctaaaaatgcagacaaagtccccggggctccagagcgaagccctccaccggcttactggctctgctttcccgggcctgaggcgtgcagcttactctggctaataaagcctcaagacagaagggttgacagcagtgtgtcttcccagctggcttcaaacatgagcactctgtggatgcagaaaacctgaggtcagaagtgaaacaggagatggagccacactgagctagagcagggcctgccagtcatacctcctgtcccctagagcagggcctaccacacctcctgaccccggcagacctgagagctctcataaaacacagacacccacccaatcaaaatggctatcgtcaaggaaacatcaaaacaacagatattggcaaagatgcaggcaaaattaacccttgcacactgctgatgggagtgtaaattagtacagccactatggaaatcagcatggatattccttaataaaacaactaaaactggcaccaccatatgatccagctgttcccctcctccaagtatacccagtgaagtctacgtcagcttccaaatattcatatatccatgcttattgctctaccatttatagtaagcaagttatgttgctgacccaggtgctcactgatagataaatggaatatatatacatacatatgtatatatgcatatatgtatatatacatatatatgcatatacatatatatacatatatatgcatatacatatatatatatatatatgaatgatgatagaacattagtcagccataaggaagaattcaatgccatttatagaattgctaatgaggaagggggcaatgaggagatgggggaagtggcagatccagtaaatggactaaacataacccaaagtacattataaacatacctgaagagttacaatgaaatccattgtgtaagacaattaacagttagctgataaaagtctttataacgtggaggtaaacattttcagcatacagactctactaagcttctttgaggtatatcttagaacaagtaataaaaattaacctcaatttaatatgtccaaaagaataaaaagtgggtcagtcacggtgacacttgcctgtaatcctagtacttgaaagtggaagcaagatcaggagttcaaagtcagcctatgctatgtaacatagatagaggccagcctagacaatctgagaccctgcttcaaccccccctccaagaaataagtaatttgaaagctaataattagaaagctcattaagagacaaaccatacaacaggcacgttgggggtggcagcactcaacagcttcatgctttctgcttagtcaattaatacatattgatacaccagctctggtctcctgagccctgttctccgggatcacgctccgcgagttccagtccagctacagatgatggcttattattaggtaaacaagactgattttggtactgactgagctttagaaagtgacgtggaggcccgcaaggatacggatgattgccagtgtgggtggctgttgctgtccaccctgctctccagaaaaggccatgcgaggagcaagaagagcagctcatttgaattcagaaagagtgtcgtcttcctccttgctgtgcataataagctcttctccagaaaagcaacccgcagcctctcttcttgtctttgctcctccattgtcacttgcatctcccataagattggattctgagtcattaccctgctcttgggatgagttaaactctcagagactgaaaaagcgcgcgcggagccctgagactctcaattgtctgtttcagattgacacagaccatgctgctcctgctgccgatactgaacctgagcttacaacttcatcctgtagcaggtaggaacggaagatgggagggtcctggggacgatgagcaggtggtggctcctagccaaagccggaaatgagtatctgtgggcattcttttagagggagtgtggttactggatatttcaagtagcgaaaagaatactttccagggtattattgatccatctctccccactacccaatgcttgcaatgaattacatgtgtctgaacgaactaagaggccgcttcctttaatgtaaggtgccaagcagctacccttttgccctctatcagggacagtgactgaggcaaacatagagcacttcgttactcatgtgagttttttttaacaagcaatggcggcagccactggtcatttaataccataacgtagacttgaattggaaactcggagacaatagacccccaatgaaaactcagtcagaaggctatgcctttgaacttgatgggacataccgtggaggatgtggtttagaagggagaaagttgtttcagaattgattatttccctggggaaggcatttcagatcactggtgtgtgccatcagggctgcagtaccaagagaacattgggtttaaaaaaaaaaaaaaaaaaaaagcaacagttgtggggctaagggtgtggctgctccacagcaggagcgtgaggctttccttgaggggaatcatgggaaagtggtactttggcgttggatagccttttgataagtggctgtctcctctcccatctcattctgtccggggggtcagcccacgcttctcttccacgcttctcattctttccctgtgggctgcttaggaaatgaaggagctagggaaacagggatggcaagttttggttttgttgttttaatatttttgttttttgttgcgccgccccgccgcgccacccccccccccaacacacacacacacacacacacacacacacacacacacacacacacacacacacacactggcactctctgtaggggaaggactgtttcttttaagaaaagcagcactaggcaatcacagtctttatgagctctgacgtatgttgagggagcgggaaggatggtggaagcaaggtatgcttacattcacacaaggacggatatgtggcaatgtgcaaggcagcttatgtctcattcagtcttcacaacactcatttggcaaggagagaggctgagacatgggaaggtgtttcaatgtgcccgagatgacatagttagttactaggtggcatatgaaagattttcacacgctgatatcctttctgcccttcccctgcccctattatagtgctaacagtactaaataaattatgacagtagacaataaattgtgaatcgtctaactgggggtgggatttttacataagttttaaaatggagatatatatttttctgttttccaattagatattttctttatttatatttcaaattttgtctcctttcctctccaaaaacctctctatcccccccccccatgctaacccacccactccctgtcctgccattctcctacactggggcattgagccttcacaaggtcaagggcctctcttctcattgatgtcccacaaggctgtccctctgctacatatgcggctgaagccttgagtccctccttgtgcactcttggttggtggtttagtccctggcagctctgggggtactggttggttcataatgttgttcctcctatggggctgcaaaccccttcatttccttgggtcatttctctagcttctccattgggaactctgtgctcagtccaatggttggctatgagcctccactcccgtacttgtcaggcactggcagagcctctcaggagacagctatatcaggctcctgtcaccaagcacttgttggcatccacagtaatgtctgggtttgggaactgtatatgggatggatccccaggtgggacagtcactgactggcctttccttcagtttctgctccaaactttgtctctgtgtctcctcccatgggtattttgatcccccttctaagaaggactaaagtatccacactgtggtcttccttcttcttgagcttcatatgaatctgtgaattgtatcttgggtattctgaacttctgggctaatagccacttatcagtgagtgcatatcatgattgttcttttgtgattgagttacctcactcaggatgatattttctagttccatccatttgcctaagaacttcctgaatcaatcatttttaattgctgagtagtactccattgtgtaaatgtaccacattttcttgttcaaggacatctgggttctttccagcttctggctattataaataaggctgctatgaacatagtgaaacatgtgtccttattacatgttggagcatcttctgagtatatgcccaggagtggtatagctgggtctgcaggtagtactatctccaattttctgaggaactgccaaactgatttccataggggttgtaccagcttgcattcccacagcaatagaggagtgttccatatccttgccagcatctgctgtcacctgagtttttgatcttagccattctgactggtgtgaggtggaatctcagggtcatttgatttgcatttccctgatgactaaggatgttgcacatttctttaggtgcttctcagccattcggtattctggagatatgttctaatgtgtattctgagcatttcacaaaccaaaacatatgttatgagttgtgttgatgaattaataaaaagaaaacccaaacagcatgttttgctcgctcagtaaacttagaattcctgtctactctttctttgcaaaacatttttattaaaatgagtgttaaattagaacgcctccttgtgtgttttaaccgcatcgttatgtgtctttctaattaaggtattttgatttcttagaaagctattggtggggcacctagaaaacaaagcttaggaatgctggtggttattcaatggtgattgaaagggaaaaggcctgggatagggaggaaaagggaaactacagtatcattgtgtgtttgtttaggcttttaaatagaaactgcgcattcaggtattatttacaaaatacaaagtacaaaaatttaaagaatataggagagtttttaaaagatcctgagagtaggggggctatgatactcattgcctgagaggactccctggttatcacgggggcgggaatgatgaccccaattctgtaattgcttggtgtgtagcccttgacccgtatcttccctgaacaaaacagttcctacccaggagttatccggatatgattcctcattaccctctatgcataaatttctaggtttaaattttaaaaaatgcttagcggatcatttagtcgttacagacagacagtagcattcctaatgctctaaaatagagaaatcacggtccacggcaaggatatgttattataagcatggaagtaaatacacaaacaagctgctgcatccgtaaaacacccaggaggaaggatgacacacagcacaatgcctttttcctaagtctgctgttggagcatccctcaataattaggtgaagctgaaacaagcaagacatcgagaagcaccggcctcagtatcagttacctctggaagcagtagaggtgtcattagttatgctctagttcttggatgaggggtgggctcctggatgctcattttacttacaggaattgcgttaataactctcctataaatcaccctgctgtaagatatgccacggacaccgaaaaccacacaaaacagatacaaacttgacctgaccaaacactgctggaaatacccccagagtgttcatcgccccccacccccaagaactacccctctacagcccaagcaggctgctcctcaaagccctgctcatgtcctcattgttacggccctgatcttcataaaaacaattggctaccgatgattaaaagaaatctttttttgggggggggggtgtttcgagacagggtttctctgtatagccctggctgtcctggaactcactttgtagaccaggctggcctcaaactcagaaatctgcctgcctctgcctcccgagtgctgggattaaaggcgtgtgccaccatgtccggctttaaaagaaatctcttaaagcattcagacagtatacgttctttgtagattccaagtcagcaaatggaagcaaccccaggttttaagcaactatatattttactgaacacactatagtctatttacctagttgatgggcattgcagctatttcagtgtctgggctaagtgaacccctgcaagactgtagagaagcctgaattgttctgatttcatgatccattaattatcaactctttccttatgtatattctgtaggtatactgttgtgttttattaaaaaaagataaagaagccagggatatgtctgatggaggtgtggtatggtgtgggagaagggggtgcctctgtgggcccatgctgagacatcccttccctttgagggaccagtcatactatggtatagcatagaatagagtttattcagggcatagggaggggagttgagggggtagtagagacagagaaaggcagagagcgaaagagaggaggtgtgggagaggtagcaggagagggagagaggaagaaagaggaggagtagaagccagtcatgaacatatggagagaagagggggaggggaatgaggagagaaagcacaagagagggtagagaggaagagaagagcaagagcaagagagaggagggggcaagcagccccttttatagtgagtcaggcacacctggctgttgccaagtaactgtggggcagaacctagaagaaatgccaatatatactatctataaagatttaacagaattagcgatacatttttatattaaaagtatttaagtttatattcagtaaaattcaccttttcactaagggaaaaataactgtgtattttgacaaatacatggtcatgtaatggcctctgcaatcaaagtgggattagatagtctttatgtaattacttattttttattattaatatacattagattatattgtttagtggaattcactgtgatatgcccacacatgtgcacagcatagtctgcagacacttggctatctgccttctttctcttagtgtaatgcatttgaggttcatgcgtgttgcagtctttatcaatggcttatttctgtttgttactgagcggtgtgtgctctgtgatccagtccccagttgtagggcacttgggctatttcccatttctggtgagtttaaataaagttgctatagatgtttgcaaataggtttctgcatggacatgcattttggacttgttagctatattgaatttctagaccctgtggccattataaacaaatgtataggaaattcttagatttccatggcagttgtaccaactttacaccgtcatcagcagtgtctgaaagtttcagttggccctggtagcaacattgccgtgttggacctctgttacccccacagatgcatggaaataccttgctgtggttgtagctttcagttttccagtggccaatgatgctaagcacattttaatgtgcttattgtctaatcgcgtatcttctttggtaaactacgtatggaaatcatctaataatttttaatttgggttcttcgttttctggcaaagcgtcgagtattccttatttatctgagatataagtctattataaggtatatggcttatggatattatctctcagcttgttttccattctttgaacaaggcttcatggacatactcactgtggtctgacttaagggtgtcatgtttcgtgtcccacacttttgatctctcagcagctcaaatcgaaaggattctttcctaacatctcatagctgttcacgctacatttaggtctgtaatcaagtttgagctagtgtctatacagcatatgggagtgcaagtcaaagacctaacaatgttcacccactgcggccccactgttctccgtcatttcttcagagggaagcacctttgactctttatcacaaagcaatagttcatagttgtgtgggtccactgaccctccttaagctaattttgaatctttggtccgtggcatgtgcccagctttttgtgagtatcctcttcttttgattcttgtaactttacagttaatttactttttgtgtcttttattgcaaaatctaaaactatcttgtagtccagatgtattgaacagatagtatttatttttatatttatgtcttcggcagaaacaaacccgtactttgtatcatggaggtttccctcctttactgccctttatcttccagatgtggacagaagcaggtaggggtggagagggagaatttggccatgatgctgcttgaaggactctggtgcagagcacaccccactcattctgattgtcaatgactcttgatatgtatgagtatgatggctaatattgataattggcttgcgattcagaaccaccaagaaaacatacctgtaagtgtgtctttgagggtgtttccagaaatgtttaactgagcaagagagactcaccctgagcgtggatggcactgtgctgtgggctgccatcttggactgaataaaagggagagagtaagttgaaatgagtgtcctgactgcaggcgcagtgtgactgctcctgctgccaggcctttcctgctgtgataggctgtacctccttgaactgtgagccaaggcaagccaagcccttccttcctcatgttgcttcttgtcagctattcctccacagcagcgatgcaaacaggaaataagacagcaaaggaatggaccctggccagggtaggatttctacagtgaaggatgtcctgtgagatgctcacacacagagccacagagcatgagtctagttcacagaacagttttctgaagagtagggactttgtgaaaaacctcccagtcccttctcatattttaagtacactgtataggaaggcaaaaaagaaaagtaaatttctgttgttcaatagaaaaaagttcaaaattagcctaacaaggaaactatcttgggagagaatgcaaatgatttgttttgtgtttcctggagatgtgacaggtgccagctgtcaccaaggcctgttttcaaaatgctaaattgacctcaggatcaaaaaaaaagactcccaaattatctaagttgggtgtcctttgatcgcttcggaagttcaggtctagattgaagcttaatttagttcctgcacagcaaatgaaatgtaagagaaaacacagttaccttaccacaaagccaaacgtttacctgcctcagtcttaggtgctgtctactcttgctggcagtagctggtagagtcgcagccgagtcatcagagcagagagaggagagcgaattatagctagagatgaatttgtgttccatttccatagacaccactcagtggccttaagcaaactgttcttcttaaaacctgtcaaatacgaacagtatcacctactaaggagggatgacagaggaccaatcagaggatagaagagtccctgggtgttgggaccagtgtgtttaataaaggttaactatcactctttccccagttacacagtgtcctaagtctgcctcacagatcctgggttttaggtttggggcaagcctgagagactgtgtttctaattagtgctcaggtgacgctgaaagcaacgtttcaggtggcaaggtggtcgtcggtgtttgcaactgcagatgtttgatctgcctagttagacttattcaatactgtctgcaagttagaagctccagggaaacggcaagacgaatgtctgcttaccccaataataacttcatctaaagaatgcgaattagggtttgggcattaatatttttttctaagaaaaaaaaaagtctttgctatggtctatggtctagatatatgttcctcaaaggttcctgttcccttatacctccagggcagtggtgtaagctttaagaggtagggtctaacagaagttaattaaatcccaaacgtccacactgataaaaagagtcccatctgtctttgaagagtgggtagttataacgggaaactaccccaagagtatggccatccctttctgcttcttcacacaggcagggctgtgtgctggcgccaagcttcttggagcccccaccaccagaatcttgaacttcagtacacagcacacaggtattttgttaaagcaaccatgagtgggcagaggcagtgtcccagaaggctcctgtgtcagactggctgaggccttctgcttggttagtctaacccgctgacagccagccctgagaaagaattgtgtacagaatccattacaagtggtttcatttcctctgtgattcacaaaaaagctgaaagttatagaatttcaaacgtatgttgcatctcctaaactacccattttgtgagaaatcaagcccaaagctttgcatgtcttggaagctatacctgaggtgaagttagtctaagtaacaagtctcagtcattgtgaagtattccgatgcacggtttgtcaggtcattgttctttcctcttgtaaatactacccccaagcccccaaaagtcacctatctgaaaggtaaaatgtatttctaaagctcaaggcatttattctgcaaggggtgggggtggagtggggttgaaaaaaaaagagaagccatgtgtttataaaaggttggggcaggggatgagggaagttctgcggtaatgacaggggagttccagaggaagttatgggctctctctcctctctcatgagaaaaaaaagatagagcggtaaacagcttagctgttaacacatctccaaatctacccagccagttatcttccttgcacactcctctttccccttcaccacctctctccttgttttccgtttgggcatctgaaatttaaaaggggaaacagactttagtagtagtaaattcctaagctaaatgctcagaaaatagcttagtatatctttgatgagggatgattatgcttcccgccccctagggagccgcagagtggatttgaaacaaagtatcttttagttacaagtgagtgaagggtttagagatgatttctgatttagtcacttttctccctggctggtacctaagtaacagcctggcagaagcgaccttagggagaagggttcattttgtttcaccattggagaggacacaggagtccacagtggttgggaaggcgcggtagcagatgtgaggcagctgtcacatcaggaagcaggaagaaagggatgctgacgctcagctaactttctcggttttacttaacccaggaccccagtccatgagatgctgtcactcccaggcggatcttccctgctcagttaagactcctaggtgtttcaaaatcccatcgaattaagacttaatcatcacagttctcctaagaatggatctaaacactaagtacataagaacttgttatttcagcatgcaaaggactctacagaatggaatcatacaggaattcctgagctacatcctttttttttttactagtatgatccgagggtcttttcagcctgatccagcaaggacacgcatgatttacattgttttgcatagaagcatataccttagagcctttctcctgggccccatgttacacaaacaaatgctgggcatgtgtgcatctcctccacactacagatctgtgtaaaatgtgcattaatgttctagttgtagtcaaagcagagaatggaggtaataaactgtccagtcatttttggtaaagctcatttgtgaaaatcactgtctggtatgctgggtggtaacccacagttgctgattcgtgtggtctcttgtgaagtatgcctcagggagaagtgaatgcaggcaggctaggagtcttctcaccacgctcccctttccctccctgctcctccagaagtgagattaatattttggatacttgaaaaatgccaaagcaagcaatcttattcatttctaaggtttgaaggataatggaagtttgaattaaaagagactggcaagctgagtatggccacaccctggccaccccagcacgcaggaggctgaaacaggaaaggtttgagtccaagactatacagaactatgtaacaagaccctgtcttataaccaaagatgatccaaaagtgaattgcaatgtgaacatcagccagcaggaaaaccaaaaggtttttggagtcaggccagggaacagacaaccttcctggttaattaaaatattctggtttgccacagttgtggtgggcacctagaatctgaggactcagaaggctgaggcaggaggaggacgagctaacagcctgggatacatagtgagaccctgtcagcgagagaaagaaaagagagaaaggagaaaggacgaaagcgaagggagagagggaagagggaagagagggagggagggacagactattctggccaataaagtatgactgtgcattccctacatgagtactactttcccaagaattaaccatcacctgaaagaacattttctgagtccctgctggctggcagacacgggtgatacacgtgctccaccttggtcagattttcccacagaaccaagagatggatatttacctcatacagacagattcatagaagctaaaagccagcccctcccctgctccaaaggtccctaactaatcctggtattgttgggatttgaactcaagctcactaaataaaaatatttttttaaaagcccacaaatatttgatgatcagattattttcttgtatgaatgataaaagagatctatggagtataattcaatccaatcttttgtgatgatttagaaataatttccatgtcttaccttactaccatcattgggatacccattcattactcaaggatgcagcatacaggttcccacaatttctacatgcaaacactgcctaggctgtttctgctgttgcagagttattgtttttttttaattaagtattttcctcattcccaaaagtcccccgtaccctcccacccacccccactttttggccctggggttcccctgtactgggggatataaagtttgcaagttcaatgggcctctctttccagtgatggccgactaggccatcttgtgatacatatgcagctagagtcaagagctccagggtactggttagttcataatgttgttccacctatagttgcagatccctttagctccttgggtactttctctagttcctccattgggagccctgtgatccatccattagctgactgtgagcatccacttctgtgtttgctaggccccggcatagtctcacaagagacagctatatctgggtcctttcagcaaaatcttgctagtgtatgcaatggtgtcagcgtttggaagctgattatgggatggatccctggatatggcagtctctagatggtccatcctttcgtcacagctccaaactttgtctctgtaactccttccatgggtgttttgttcccaattctaagaaggggcacagtgtccacactttggtcttcgttcttcttgagtttcatgcgtttagcaaattgtatcttatatcttgggtttttgggctaatatccacttatcagtgaggacatattgtgtgagttcctttgtgattgtgttacctcactcaggatgatgccctccaggtccatccatttgcctaggaatttcataaattcattctttttaatagctgagtagtactccattgtgtaaatgtaccacattttctgtatccattcctctgttgaggggcatctggattctttccagcttctggctattataaataaggctgctatgaatatagtagagcatgtgtccttcttaccggttgggacatcttctggatatatgcccaggagaggtattgctggatcctccggtagtactatgtccaattttctgaggaactgccagactgatttccagagtggttgtacaagcttgcaatcccaccaacaatggaggagtgttcctctttctccacatcctcgccagcatctgctgtcacctgaatttttgatcttagccattctgactggtgcgaggtggaatctcagggttgtttttatttgcatttccctgatgattacggatgtagaacattttttcaggtgcttctcagccattccgtgttcctcagttgagaattctttgtttagctctgagccccatttttaatgaggttatctgattttttggaattcatcttcttgagttctttgcatatattggatattaatcccctaactgatttaggattggtaaaaatcctttcccaatctgttggtggcctttttgtcttattgacagtgtcttttgccttacagaagctttgcaattttatgaggtcccatttgtcgattctcgatcttacagcacaagccattgctgttctgttcaggaattttccccctgtgcccatatctttgaggctttcccccactgtctcctctataagttttagtgtctctggttttatgtggagttccttaatccacttagatttgaccttagtacaaggagatagaaatggatcactttgcattcttctacatgataaccgccagttgtgccagcaccatttgttgaaaatgctgtcttttttccactggatgtgtttagctcccttgtcaaagatcaagtgaccgtaggtgtgtggattcatctcagggtcttcaattctgttccattggtctacttgtctgtcactataccactaccatgcagtttttatcacaattgctctgtagtacagctttaggtcaggtatggtgattccaccagaggttcttttatccttgagaagagtttttgctatcctaggtttttttgtattccatatgaatttccagattgccctttctaattcgttgaagaattgagttggaattttgatggggattgcattgaatctgtagattgcttttggcaagatagctatttttactatattgatcctgccaatccatgagcatgggaaatctttccatcttctgagatcttctttaatttctttcttcagagacttgaagttcttatcatacagatctttcacttccttagttagagtcacgccaaggtattttatattatttgtgactattgagaagggtgttgtttccctaatttctttctcagcctgtttatcctttgtgtacagaaaggccattgacttgtttgagttaattttatatccagctacttcactgaagctgtttttcaggcttaggggttctctggtggaatttttagggtcacttatatatactgtcatatcatctgcaaaaagtgatattttgacttcttcctttccaatttgtatccccttgatctccttttgttgtctaattgctctggctaggacttcaagtacaatgttgaataggtagggagggagtggacagccttgtctagtccctgattttagtgggatttcttccagctgttgcagagttatttaagtcaactcattgtttaaaatacaagcaaacaggttactttgtataggcagaaactcagtaacacactagtataaaggaggctaggaacaaaagcaagcactgaaaaatcaagcagtcctactaagttcttgccaatgcgagtcatcttccaaggagctccctaccttttgctaaagaagagatgttcattccaaaacaatagagtcgagttaggaagcttgtaggtgaaggattggaatcaaattgagaagggaataaatttctctacaaacaattcacttcccttcaggctttggttttgtatgacatgaaattatctcgcatgtctctgatgagattcatctcaaattttggaaaatactgtgaatagaaactgcagcttttcaggtcaaacaccaatgggccctaaattgctaccatatgaactgtattcctaagaatacagccaatgtctttgaacaaaattataaaatcttaatgaccatacatgtttcaggtcatagtgttaggtaatacagtaacaaagtaccttgcatggaacttggcctgtagtggttaaaaatagcccccccccccatcacctttgactttcttgatccaagagtgaacatcttcactgaacttttatgacttggtgattaacagcatgtgaaaccttgagaaatcctggaccagtcttagctatgcactcttaggcaagtaatttaaccattctatgccttacttcattttaaaggcggtaacaatgctgcctgtctccctggcttctagggggactaaaagggatactaatgtatctatgagctctgtgaacaataagaggtgttgttactatcgctggttggaggtggtgatgtttggcaaagagaggtaaaaattgacttcatacaaactaaagagagtcagcccaggtgattgaaatataatggtaataaataaggcagatcgcagtggtagggcagcctaaagaaaggtttggtctcaaaagaggaaatgctctgggttgactgcagggccctgaggagctagcgggagatgttgttgagggcaagcaggcctgtccatcagaagttcctgctggggtgttcaggagaaacaggagtgcgatcagctgtgcgggtgggaatgttcagatgagaaaaccacctccaggtcccgaggcaagaactccactgtttctatatgggatgaggggagggaagagaggagcccagagaatggcgaggatcttctaaaagatgccggagggagggagcacaactctcattccagaagaactgaaacgttgacataaaagcagacaacagcgagctgtgtctcccttgcagctttattcaccgtgacagcccctaaagaagtgtacaccgtagacgtcggcagcagtgtgagcctggagtgcgattttgaccgcagagaatgcactgaactggaagggataagagccagtttgcagaaggtagaaaatgatacgtctctgcaaagtgaaagagccaccctgctggaggagcagctgcccctgggaaaggctttgttccacatccctagtgtccaagtgagagattccgggcagtaccgttgcctggtcatctgcggggccgcctgggactacaagtacctgacggtgaaagtcaaaggtgagtgtcccccgcaagtcatctctgacggagggctgtgatagcttacacaacagcatgggtagctcaggccaaaaccagagaccgggtcttaagaggcagccccttcaaaggggcacctgagcggaaatggtttttggcatctggtataagatctaagtcaaggtaacgggggttaaagcttacaatggagccaggggaagccaggaaaatgagcagacaccaggcctcttcctctgctggactcggaaagtaccggctgaaataacctactaatggagccacatctgtgccttcagctccattcccaaggggaacttggaaaccggggaatatggctacctggagtcaagaacatactgtcctgactttccaagaggggaaagcttttggaattaaagtcaggccctataatataatatccataagctgtttaatgacagattggaagcaaccctcaaagatttatttcagtggttgtcttagtcagggcttcaagtgctgtgatgaaacaccatgacaaaaaagcaaactaggaagtaaagggttgactcagtttacacttccagatcacagtccatcactggaggccatcaggacaggaactcaagcaaggcaggaacttggagactggaggccatagagggtgctacttactgctctgtccctcatggcttgcttagcctgccttcttacagaacccaggactaccagcccagggaaggcaccacccaccatgggctgggccctcccccactgatcattaattgaaaaaataccttaccgctggatctcatggaagcatttcctcaactgagacttctttctctgtagcgactctagcttgtgtcaagttgacacacaaacccagccggtacagtgactatttgaaattcacctggatcctgttaagacaaaagcatataagaacatttccactttattctgagccactatgatgattaagacaacaattgctgtgtgcaaagtttgcccttgtcttagaagtgatgtgggggctgccgagtttgctaagagcatttgctgtgcaggagtaaggatctgaattcaaagtcacatcacctgcagtaaaaacaatttttgtttgtaccctcagtgtcccagagcagtaacaggcaggacctgggagctccctggccagtcagcctagccaaaacagtgaacttaagcccatctcaagagagtgctgtggagaacagtaaggaaagccatcttctgatccttacatgggcatgcccacctagacacatatatatgcacagagaaatatacaccacatactccttatatggacacacactcctgcacacacatgtgcagagtaacattcaccatacaccctccccacacacatgcatacatacaccagggaaatagaaaccatgaaggatatagaaatctaaagtagaaattaatcaatcttttaatgttagagactgaaagctcagcaagggaacaaggtagcaagtcacatcagcaagagtactaaggaagacgtgggtggtgggcagtggagcccctgggaatgtcacttggcagaccgttcagtgagagccggtgacaggaatgaaatgattctgctgctagagacactgtcagagcagagcagagagctaagtcctttaattaacaagaaagctgagagtctgaacggtcatgtcgccagcccttgcctaacacctttcagattcttagccactgcgcttgttatgttattttaccaagccacacaagtgtctgagggaagaagttgatggcatgagaatgtacttcccaatggaagtgtaattacgtggtgcttatgggaagatggcatctgaaggaagaggaagctcccattgatagctacatttaactacaagttggtagctaggagattgctagtatgagaaaaacagatgttgctaaagataaaaggccatgttttcatttggcctactttagatttcactgtgctctagccatagtggaaatcagactagaggttccttaaaaaactaaaagtagtactatcgtttaattgagctatagtactcctaagtataaattcaaaggaccctaagtcagcctaccataaaaacacacaccacatttattgtagaactattcctcttaggcaagtcacagtctagttggccacaacaaatgaatgcataaagaaaatgtagtgtgtatgtttaatggagaattcggccataatgaggaaaataaccatgtcctttataggaaaatggatagaactggaaatcactgtgtaaagagacataatgaagacttgggaagaaatgtatatgtttggtctcatctgtggactataaagggaaagggatgccatcaaagtaaaaggggactatcgggggacaggaagggatgagggaggaaggaggaggggggctgacagtaatggaggggtcagtgtgtgtatgaaaatggtaataggatctatgttttgtactaccattatatgccatagaaaaatggcaggatctttaaaaagccacatttcatactaataagaatccacactctagggagacatgacaattctaaatgtatacacatctgaatatatagcttcaatatgttaaacataaattggaaagatggatattccttccttgaagccctaccctctctcagaagttatttttctaactttttcttttaaattatttttatattttgaaattataattataccattttaatttttttagcaccccaaacacatatctatctttttgcaaagtcattattcttttttcattaattgttgctatagacatatgtatatacataaacgcacataaatacacacaaacacatatatgtatacatatcatacatacatatatatcatacaacctgctcaatctgtacaataccatatatatatactcagtattgaatacccatttggtgtactcttcgctggggaaaactatttctcccactctcaatattccttagttgtctataattgcctttagttttttgtttggagttgaggcctcctggactttttcactttttcctaataaatcccagttctatttgttcaaaaacaattggaaggagaagagtaggaggaggaggaagaagaagaggaaaaggaagaaatagaggaagaggaagaaggggaaggagaagaggaagaagaagggaagaaaaggaagaagagaaagaagaggaagaaggagatgaagaagaagaaaatgaatttgtgcatatgtgagtttttggttcatctctgctatagcagaaaggacaagacatacagaccggaatgacacacttaaccatcctcacctagttaacatgtctagagcaccaactgcagaagacatggtgcttctaggttcgtgcctagccctcaccaatgtagttatctagcaaagaagaacaaagcaaagttattgcaagagaagaacttctcattgagttggaaatcttgaacttttttctttcattcatttttattctttaatctttttttttacagttcagacttcaccctcttctcagtccaccctccaactgttccacatcccacacttcccacaccccactcctctgtctccacaaggatgtccccatgccccaccccaccagacctccccactccctggggccccaagtctctcaagggttaggtacatcttctctcaactgaggctccttgggtgtaaatatctgcatctgactctttcaactgcttgttggacctttcagagggcagtcatgatagaccccaatttgtaagcacaccatagcataagtaatagtgtcaggccttgggcttgagctgaatctcaatttggacccgtcactggacctccttttcctcggtcccttctccagttttgttcctgcagttctttcagatcgacccaggaacaattctgggtcagagtttgtgactgtgggatggcaaccccatccctccacttgatggcctgtctttttactgaaggtggactttacaagttcctctccccactgtagagcatttcatctaaggtccctccctttgagtcctaagagtctctcacctcccagatctctggtacattctggagggtcctcccacctcctacctcctgaggttgcctgtttccattctttgtgctggccttcagggcttcagtcctattcccccctgccccgatcatattcctctcttcccctccctgtcacctttcccacccagatcccatccccacccccaattgctttcttctctttcccaagtgggattgaggtatccatggaaactgaacagctctctattcaataacttggtcagggaagaaataaagaaagaaattaaagactcctggaattcaatgaaaatgaggacacagcatacaaatttatgggacaatgaaagcaatgctaagaggaaaattcatagcactaagtgccctgataaagaaattggagagctcctacactagcaacttaacagcacacctgagagctctagaacaaaaagagaaaaaacacactgaagaggggtagaaggcaggaaatagttaaactcaggacagaaatcaaccaactagaaacaaagagaattatacaaagaatcaacaaaactaaaagctggttctttgaggggatcaacaagataaacccctagccaaactaaataaaggtcccagagacagtatgcaaattaacaaaaccagaaatgaaaagtgagacgtaaaaacagaaactgaggacattaagaaacatcagatcccactacaaaaacctatactcaacaaaactgggaaatctagatgaaatgcattgttttccaaacagataccacataccaaagttaaatcgagagcaggtgaactatctaaacaggcccatatctcctaaggaaatagaaggaattaaaaacctaccaaccaaccaatcaaaaaaaaaaaaaaacccaaaaaacaaaacaaacaaacaaacaaacaaaaaaacagcccagggccagatggctttagtgtagaattccatcagaccttccttcaaagaaatcttgaacttttaaaagtacttccacctctgaaactcatttgctcatcttttcacaagaatattaccccagtccaacttcctcattttatattgttggggataatatctctccaactactttccaatgaaaaatggactgtgaaggcatttctgataatgtaactgtgtagggtgggggtttccatctcttcctgaaaccatgatggttcctttagctaactatctatcctttccgatgatgtgtcctttcatttacaccccacaaggcaaagtctcagccaagcacctggctcctcgtccttccccttctgaatcacctttctttgctcagccaagatcagtttcttgtttgaagccctcccatggaagttgcctggatcgcccctacagcaaactactccaaaaattcgttttccatatttaccccccaaagtcacaaaagtagacataagatacagtatgatatagtgaaatatttctaagaagatgctgaacccagagaaaatgtatggctaatctagaggtgaaatgagtacttgacatttttacttcagatactgtttgattggcagagacagcccaaaacttagttccaagggattgggaggactagaccaaatcatttagtagacagtttcagagtccaagtctctttgaattctggggattgctagattgataaagagaaggcaatctttctgtttgtgttatttcttggcccattgtggtatttttaatacaaagtgctatgataaaatgcagaagttcacatctctccatctcaaggattctactgtttccttgtttacaagctacgaatccaaaatttaccaacctcatacagttcttgtatactttaaataagataatggtcgggttaccaggctagggccacattttatggccacttaacccctcctcttctcaaagttttaaaaagtgtgagcagcatacaagaatgcaaagccatattggaagtgaacatcatgtgacaggtgaatggtggcctggccacatgattttcccctcgcctccctatttggagcatctctgggtgacttacatgggagagcatgaataagagcaaagaccctcttcttccctgccctctcctcttaatctagaagcacagattttcactagaccctgttctagttttatttctgaggcttggataaaataccttgaggaaatacaacttattcttgaagggattgtttggcttagagttccaccttgtattctttttgagggaaaatcaaggcaggagctcagatcacacccagagtcaggagcaatgacaaatgaatgcatgcacatttgcttgcttgtgttcagcttggtttccctacttttatgtagttcaggaccacatgcctaggaaactgcaccacccacagtgggctgggtcttcccatatcaacttaattaagacaataccccatagagatgcccaccaaccaactcaatgtggacagcccctcattaaggtgcttgcctcagatgattctagattgtatccaattgacaattaaagtttaccattacagaccctaatccattcataaaagataagaacatctttcttatgcctggggatatagtacagcagaagagcacttgcctaacatgtacagtgccctgggattaatccctggtgatggaattaatctctggggaaaccctgattctctgtgtctctgaatataactagtcaaattaataagttattacatggaagcagaacagagaaagacagagaggcaaatcacatgggaaaggctctgagcatgtcttcctcctcactgttctacattaggtaaaaaggtcatgccgcaaagcttacagttaagattctgtgagtgctataggtatttaaggcattaaatacataggtatttaaggtttttcacataactgttatccacctgggtaaagtcatgcagggtctataatcccagcacttaggatacggacaccagagggcagcaaatgtaaattcatcctggaatacgtaatgaggtcaaggctagcctaggctacattgagagagcctgtctcaaaaacaaaatctaaaaaatatagttgctattagtttaatatgaaatggtctttccaatgagtgttatgttcttatatattccagcagtttaagaaactaccttatcacacctgttatgattgcctttcaccactgtgatactgcacttgacataagtaagtcaggggagggagaatttattttagctcacagtttcagaggatccagtccatcatgatcagagggatacagcaaaagagaactcccatcatggcttgttttctctttagcttgtttgggttcccagcctgtgggatggtgctgtctatgttcaaggcagacttcccacccactagataactgagcttcttgtccaatcaaattgacaagattaaccatctcaacaactgtggttttaacttcaagattgcttttacttcaatgcctgtactacttatttaaggaaatatttcccagttaatgaaaggcaggactcgctcccccttccatcatcaaaaccccatagttgattgtcaacacttccagctatatacatgtgtagcggtattcgttaatttttaggtgtggcctaagactgttggacagtctttgtgccttcctgactctccaaatatctccttttgggtttagatttccgtgttctagaaagtagaaaatcacacatgaatagttcatttagtgtgcagtcacagaacatatctgtactgagaaataagaaacacacccagctctttttttttttacagctcatacatgagtccttattttcctcctcctaatcacaaagataatggagggaaaggaagaacttttgagtaaactttctactgatgctgtctgaaaagtgatctattggggtaatctagccctaaccattccctcagctttcaccatccttcaattatgagactgtttagaatacaagagaccacagaatatggcatcctagcacagtgctaggatgtaaatttgtagccttcctactttcaaacattgggtctatccatcttttttcttctgactttggataccactgtcaacctgtcttcagtcaacctcaacaaaaattatgtgtatcaaacaaaacatctttgttgtactgtatgaataaaaactattcaaactatacaagctaatgaacctgagacataggaaatatttttgagtttagaaaaatgtatcacctaagatcaatagtaatcacgtgtttcttcttccattgagtacaactgtacagcaatccaaaacaacatttctttttcttctgttgtccagcttcttacatgaggatagacactaggatcctggaggttccaggtacaggggaggtgcagcttacctgccaggctagaggttatcccctagcagaagtgtcctggcaaaatgtcagtgttcctgccaacaccagccacatcaggacccccgaaggcctctaccaggtcaccagtgttctgcgcctcaagcctcagcctagcagaaacttcagctgcatgttctggaatgctcacatgaaggagctgacttcagccatcattgaccctctgagtaagtgtggcccccatttcctagtcctatcaattagagttcagacgggaaaaatcttaagtgtaacttgtattcacaagagataattgtcattcagaagcttacttctgaataagctttctagatcattttgaactctggctgactggttcaattcagctcttctggatcaaaattcctctcccagctgactggttcaacctgagttctcttggcttctgactgaattgcccacttggcctcaaactaaccggcaatatgtttaatcttctgtttccttctcagtctctggatcgttctgtcttcacctgtctctgtaaaactgcctcctctctctcctctctctgtgtctctctgttgctgtcatctctgtctctgtctgtctctctctccctccactgttctctcttaagccacctctcttccctgtcctcatgagagttgggcatatcctatctctgactcattctgtcaagtctttctcagatttgtcactttgtctgcccctcgttttcatacatggctgcttccttctacaaactaaccaaatcttcaaggtttggaattaaaggtgtgtactaagggtgtgtctgtattccagatatagagattaaaggtgtgtaattccagccagattacatagatctaggtttttggatgtgatcccttgccaaagcagtcatgttgctggattaaaattcctctacaagaaacagatggtgcgctcatatggcttgttcaaaaaggggttctaagagactcttcatgaagtcgagatagaatatcgaagaactacaaacatagaatggggcaaagatctctactgttgagaaagagttaccagtgttggagaggctaccaggagaagacagctgtgaggcagctcctctgggagtgcagcttcgaggagggaagtatgtgacataccacaaccactctgcgggtcccccagtgtcctactggtgcctcccattggctggtttgtgtgtgtgtgtgtgtgtgtgtgtgtgtgtgtgtgtgtgtgtatgtgtgtgtccccgtcccttcttcaccatgtgttccctgaacttgatccaaatgtagagaatccacaaaagaagattgatcagcatgggtttaagccaatagaaagtctgtattagccagctgtccatcatactgtgtgtttgagattatggtgtagttaacctttttcagttaacaagaacagttaccagaagcagaactacagaagccagaaataaagcaaggttagttagtacatttagagaatttcctagaactatgaacttggatggataaggtctttgtttttatttgtcagatggggctgtccttgggctgagttttatgacttgaatggcacatccatcatggagtcagttgtgctaaggtctgaaggcatagtaacctctggagctctattacattccccactggccctagagagtgagttaaaccataggctcattctattttagttcaaggtataagggcccgtggttgatcaaatcaggagaatgacatgtgcagtgagcactaatagcagatagttagccaaggggactacgagaacagacactggcatcaattatctgacttagggctctgtctcttttccttccttccttccttccttccttccttccttccttccttcctttcctttgttctttctttctttctttctttttatgttttcttcaaccatagcaagactttctctaattactcttgatcaattagcatagaaacaacaggctcttcccagggctagacatagttttcttcatctcgtgagaagtctaaacctctccaattttataggatactttctgcaggggaatctaactactctccaccaaatagtcaggggtttggtgatattgctgtcatccagatgaatcagcccataaggcagaatagcaggcatcagaataaggtaagctattatgttaaaggttttgtatattaggcaagtttcaggtccttgtaagtcctgtaatattaatttgtgttgatcctagtcacaatgaatgttgtcagtcagtagactgacagtctagttagttcctatccctctgtagtatgagggctgggctgtctaaacataaccagccatcctggccaacttctggctgggagtgatgaactcccgggggcccttcctgtggcataaagtccgattccccaggttttccctgtttcccaaaggccagaacttttttttaaagaagaattttaggaagcctcagtttcacaaccctaatttttacaatggaaacttttttgtttcctggggcccagtgaaaccttaattttaataggtcacagtgcaggagacagtccatttggcaacagtgtctgtggcttctgctttctcgacctggatgtactgaatccatggtgtaatgccagttgtcttcacagccataggagtagaaagaatcactgtgtagggtcctgtccaagttgttttcagtgccctttagggcagccacttgacttgaacaaatagaaactggtggtgaacttggaggttggctgggtctctcagctagtccaagactgagggtctatagtgactggacagaggaatagtcagagagttctgtcaactgctggtctctgagctcgagaaacagtgggggaggtcttccaaatataatctcatagggagtaagtccctccccatatggggtgaaacaggtctatgcaaagcaaaggaaggaggcctatccacccctctcattggacactaatgagagttttgttagggtttctttttatgtcctggttattcttttgacctggccacaactctgaggtctgtatgcacagtgaagttttcagtcagtgcctaaagctttagctattacttaataggttttgggctgtaagctacgttattgtcagaccccattgggagggggaggctaaatcaggggacgtggaggccaaaaggacctggaggagtttttaaaactactatctgagcagtactggaaaaactggcaagtactgggtggtggtggtggttgttgttgttgttttgatcctcctctggcaggctaaatgttggcaaagtcagttttactgttttgtgatgtgttggcctcttatttggaccccttcctgggaaagggctctctgttttgcattttcttgagcacaaacctggcatctggttgaagcctccacactaggctgtccagtctaggtataacataccttgttttgagcagctcagaagttttgtggaccccaaatgagtggcctggtaaaggtcagttgccagaatcctgcctgttgtttctgagagaacagtctttctttctggagtcctccgtcaacctgtgtgtttaagctgtccatttctcccatggattctcagccagtaccaggtcagggtacaccatcagaatacccatagacccattggtcttagggacatttgtctggtagccaggtcagcaggcaggcaggagaacagcagttcatggaggaagccaaatagcccctaggaggacaaagattttctaatgttcttttccccaacaccaagaaaccctctttctctacagatcatgtcatggacatgtctgctaataaacgtatagcaactgctggtgtatatggtagtggactttccccatctgagagtctgggtcagatctattctgctctcttgactgaggcaccaaatttggacccaaatcctttccgttaaagtaactacagcagctcccacatacctgttgtcatctttcatctcctgacagtcacggatgagcacttctgggttgtcagcaggaaagaaggcagcaggataggcagtggtggggttttaaaactggactcgagggtgggccaggagttgggcctggaactgggtcacacaggcattagacagaattctagtgctccttaaaggagggcctcaactgtgccatggggtgttgtgagcataacatcttgacccagagttaacatcattatgatcattattaattagtctagtagtagctgctatatctcttaaatgggtgggccatcctgtggctacagggtccagtcgtttagacaggtatgtcacagggcatttccgtggccccaaagtctggtttaaaaactcccttctgtcttgtttcatcaacaaacacatgagaaagtttcaagacatctggaaagactagggcttgagtggaagtcagagctgtttttaaagcctcaaatgccttttgtttaatctgagtccagatcagaggaccaaagcctgctctgtgctggtgtagaggccttgctatttccacaaacactcgtatccagaagcagcgatgtcctgctagactgtctctcagacctcagactctcaaacctgtccgttagtctttggaattgggatctgacagatggctgcactcctactcacacaggctcttttgactcccttcagctggcggccaagacaagtagcctccagtgtgttttcatagttcgcgtgaatcttctttgtatccagatcatagtgaacgtcatgtttgggccatgacaagtgctgccatgacgaattagaaacataatcagtcataaagaacctcagctccctcatctcagctcctagtctacgtagacagaccagatgtgacaccctgccttgtgaccccaaacaatagcagcaggataaacacagtcacatcctcccaagtggtcctacctcttaaaaccattgtctagctgattcttctcattcttatcaaccgagctactcacccactgctggctgctgactgctgtgaaccacctcagaaatcagtgaataaaacaaatgcagaagtgaggtgcgaggatgcctgctactctagaacagaaggaaggcagagggtgccggacactctagaacagaaggaaggcagagggtgccggacactctagaacagaaggaaggcagagggtgccggacactctagaacagaaggaaggcagagggtgccggacactctagaacagaaggaaggcagagggtgccagacactctagaacagaaggaaggcagagggtgccggacactctagaacagaaggaaggcagaggatgcctgctactctagaacagaaggaaggcagaggatgccggacactctagaacagaaggaaggcagagggtgccggacactctagaacagaaggaaggcagagggtgccggacactctagaacagaaggaaggcagagggtgccggacactctagaacagaaggaaggcagagggtgccggacactctagaacagaaggaaggcagagggtgccagacactctagaacagaaggaaggcagagggtgccagacactctagaacagaaggtggaggatgtctgacactctagaacagaagactgagtgcactaagttttggtcagcaggtagggagtcatcaggtcattttcctttagaaacagggctgtcctcagccagtggctacattttcactggcatatgtaactgggctaggtcatgggattaaccgtaaaatacctggtagagctggcagaaaagtgaagccctcttgggaccgctcaggtaaggagctagaaaagaacgtggactctgaagccagacttcaaactttcaaatgctatctctgccgcctcttggctttagaacttgactaccctacagagccttctgggaactcagtctcacaggtatacagttacagtaaatgatgatacacatgcttaaaaagttactgtgtaggtaaatgaaatatgatactaacaaggagtagggaggccactttgtcacctccagcaagactcctggcttctttctgagtgcatagggctatggtaagaataggatggatatttttttccatcacatatcttatcattgttaaagggaatgcagttatcttaaaataatagaaaagaatatgtaggtcacccatgctgccataatgaagattctcaaacatgcaatgactcaacacaactgtgtatttctctttacataatacttagagagagagaaaacgcttcaggcagctaaacaactaccttccgtaagtcattcaatgacccaggttatttccatattgttactctgtcattctccgggatatcgtccctgttaaattgtcaaatcagggtcattgccaaatctatatccctgccttcagagaggaaagagtagtagaagagaactttgatgttctaagtcaagatctggagaattcactcttagccggaatttagtttatactacaggctatgtttaagtgctgatgaggtctagaaaagcagcccctcagagagctctatgtctaactattaacctagcactgggaaggaaggagcaggtaagattaccagcaggttgctacatggtagctactagagggagtaggtaagattaataaccagcaggttgctacaaggtaactaacatagactagtcaattcagcctaggaactgagacttaagtctctcctgcagtggtgctgggcttcataccagactgagtggtggcttaggagccaactctatcctccaaatgcattctaagaaaactaaagtcttcaagggtaagcagaaattccatacatggaaggatctatgagcagacctggacagaacaagggttcccaaagacgctgaggcaggggcctggctcacagcactaccttgcaacatgcatgtagtagaaaaaaagcagtgtgatcagttagggtttgcaacacacctctacctgttgcatgtaattttaaaaatatgctatctccttggcagatctgctgcgccatccccactctcggaaaaacccattcttcccagcttagctccgccaatggccagctggtgcctttcccaggagctgcgattatgctcccagcccttcccagctagccaccagctactgcctctctctatctctgcccacctctctgagacttagacagctttattaacttagtacttgtcagatagcataattgctgggagcagaatctcattgttcccaagcatggccacaaactcctttctctttcctcctcctcctcttcnnnnnnnnnnnnnnnnnnnnnnnnnnnnnnnnnnnnnnnnnnnnnnnnnnnnnnnnnnnnnnnnnnnnnnnnnnnnnnnnnnnnnnnnnnnnnnnnnnnnnnnnnnnnnnnnnnnnnnnnnnnnnnnnnnnnnnnnnnnnnnnnnnnnnnnnnnnnnnnnnnnnnnnnnnnnnnnnnnnnnnnnctcctcctcctcctcctcctcctcctcctcctccttggacccggaagttctacctttacccttcacccagcaattagcttccaccttctttattgacacaatcaagaaccaattcagctcctctccctacatctaccaaactggcccttatctttttggttctagcgttcacatgctcttggataaagatgatagctctggggcttgagttttggatcaagaagatctatatctaaaaccctggctgttttacttccttggaaacaattaccatagacagattagcatccctgaggcttccttggctctaaagtgactctggattatatatatatatccttccttagccagattttcccatggtcccatactctgtagagggaaggtcaagagcagagcagccagcagaaataggcatagggtaacttgtgtgcctattctttgccatgttttcaacatctctgtagccctcttttctctccatctggccagcctgaaggtaccagtgctctgcaaagctgttccccagcctttaaattaaatcgcctcttcactaaatggatgtgtcagtggcagcaccttggttagttcagacaagataaggggtaacttgtatctgaatggctggatttaacatgtcagcccattggggatattctgctctttcaaaaggaccttgctggtgtttaaaattgaataactaacagtgcagagtctaggctcttgagttcttatcagtgagggagaaaatacatttttgagctgagggactttttctacttgaatgagaaaatccagatggtgaagaaaagagagatggaggtagagatagcgacagagacagggtgggagggaggaaaaagaaagatgacgaataggtgggtgggtggaacaacaaagcgacaaaaggactgcatcatagctgaatcacctgctgtctaactttggggacatttctcagcctttcttctttcatgggtgaatgtggagatcaaagaagaggctgcctcactgggtggaggtgaaaggaaaagaacctctacttgagagagatgtggaatgaaggcttaacttcatttccacgtggtagaaaccacacaggaagccacctcagtctgtctcggggccaccttgtgatgagattccggttctctcattcacccaggtcggatggaacccaaagtccccagaacgtggccacttcatgttttcatcccggcctgcaccatcgctttgatcttcctggccatagtgataatccagagaaagaggatctaggggaagctgtattacggaagaaggtgagtgacttacaagccatgtaagcctgtggcctgcgggtcttcagagaagcacttcaagcctagaagggttttgagattaccctggggacattctactccaagaagaacatggtccagtcttcagtgagctgaacccacgctgaagttttgtgttgttttattttggtttttttgttttttaaggggaagtttgttccagggctgaaggagtttggcttgccctccaagcttcatggtagccaagttatagaatcagccagattcccatcaatgataaacaattttttaaaaaaatgtgatatgtgtgcataacagagcaccttgtagccttaaagaaaaaattaaatactgtcatttttcaggggaagaaatgaagctagaggtcatcgttttaagccctactcagaaggtgcagacagagattatatttcttttgatatatagattctagacttaaaaaaaaaataaatacaaggacaaggtacccgcacagcggaaaggagatacaatgatggaagtgtatatgtgtgtgaaaagccatgatgattaggctggagaaatggctcctgagttaagagagtcatcttacagaggacttgagttcaattcccagcatccatatcaggaagttcctgatcacctgtaactccagctccaggggatctaaggtcctcttctagcctcccagggagctaagttagtccaccagagggccctatctgagccaatgctgagggcctagtgggtaaggggttgaatgtacacaactgtggccgacaggaagtcccacctgcctcttcagccatatgtgtcttgcacagagaccaatggcaagtagcatgtgaggatgccataactaattcactgccactgtggtgtagagctcttgagtccttgctagagcagagtcccatgcagagcccattaaactttcatggctgatgaggaaagaggggcttccttccttctcgtcagctgcaccatttgccccttctacactagaccctcataaggaacctgagtcaagagctttaacttctctctcttctacagttctttgggccattgttgtcctgagactacagtaaagatagagaagtctccatccctttctttctagaagcctcctcggctcctgtacagatttattcatcagataatcacaacttatgatgcctgctgagtactgggagggcagccattgccagtccataaaagtgtcttattaactattcctttcatagagccattcaatcctttgttgaaggatccagtgtgaaacaatatgttccagagaagttggcaaattctagttctgttttatcagctaggcttaagtatatgggaactatgtttctctcatcagtagatatatgttcaatatctaaaatgctatgtggtatatatatataagataatgcccaataaaattgtaagttttttcttttttcatccctgacaatttcatacatgcatatatatgaacctatcatgaactttagacattccatccccctttctctactcttacctccccttcctttcctactgacgttttctttccaacaagtctcctctctactttctcgttttctttgtgtgggtggagccccctgagcttaattgaaattgtttgcgggagcatgaggcatgagcgtaggttacttattaaaggtcaactgaccggtagttacaccactgaagaaaatggcacccctttccatagcaaccattacctcccaatagtgcctcagaagggggcatcgtggattccttctcatccataatgaaatgtaggcaggaccaatcttgtgcatatttgagcaaatatacaagctatgctgggttcccgagtgcaccagctatgtctgacgttttgttgatcctccccccaccctctgtctctcatattccttcctccccctcttccatgatgttccctgagtgttggagggagtgaaatagatatctcatctaaggcagtgcttactcttggattttggtctgttatgggtttctgcaatgctcattaaacttgtagtctactgtctgtaggtgagcatgacagacctgctttggccatttgagtagccatatttaaagcattcacatgctgtagttacaggctacaatattggatactgcagacagccaacatcactgcacatcactgcccagcactgtgataaatgtccccctcaactcctctccaaattacaagctttgcccaggacagaaagcagtgcctttattttgtccatgaaggaactgaggttcagaaaatccgtgtgacttcccaaagtcacacaacatagacagttgaactctaaaatgtgtgactctttttatggcaaaagagcttaattgaaaccagcaatctgaatagtattatccatacaagggaagaggaagtcgtaacccaaagaattaaatgagttctcatttacatgctgggccaatcacgaagccaagtcagagtcccacagaagttacctgtacagagtctagatctgtagagcttattaaactacaggtggcttaaatgaatgaggattaaaaaaaacttggcacatgcaatgagcaataatcaattcaaacatacatatataacaaatgcaaggtgcttatggcagttctcattcatgttatcacatgacttcattaaagcatggtctggacatacaacacagtcactttacactgtgcatgctcttctataactgaatgtcaaggatgctgcagaaacaccttgggtccaagttgagactattctgtgttatggcttgcagtgtttttattgtacatacaaagtcttattatctcattgaaatagaataacttaattctaaaagtatatttcaagacaaggtcttatgtcatacaaataatataagacaaagtctcattacatagctctagctgtcttggaactcactctgtaaacctggccagtctggatctcacaatgatctgcctacccctgcctcagaagtgccaggattaaaggtgtgagccactacatgcctatataaaaacacttttaatatttttctaccacttttcctcaatatgtgtcaaattcatataactttatatttagttgcattagaaattttatttctaaagctgatttaattgctagcttgagtttcattaaaaagttatcaatgagttttgggttgttattaggacagaatttccaaaaatttcttaagtgcccctaaatatacttctgctaatttgtgttgtatatttatgtgagaggtgttctctgccattcaccataaaactattaattttaaatacaactaactcactagtataaaatttttcttttgtctttaataaatggtagaattatatatgcacaaagaattgcttttaaataagttaattatttcataccagtaaatgcttagtttctgtagctatacactgtcacacatacatcctccctcacatacagtttcacacacacacagtcacacactatcacatatacaaatacactcacatacaccttgtcacacacaccctgtctttctctcacacacataccctgtcacacacatacacacacacacacacacacacactcatacacaccctgtcacaacacataccctattacacacatacataccctgtctcacacacgcacacacatacacactcacatataccctgtcacacacacattctcccccacatacagtcacatacacacacagacacaaattcttatatacacacctacaccacacatacacacatccccctccacatacacatagaataaaataaaatatgaataaaacttgggactactatgttcttgtgttttcccatttcatacagacctcttagttactatgtagccccagctaatctcaaactagaaattctcctgcctcagcctcccgagcctggtacaggtatgtatccttggcttcctattgcagtttttaagaactcctttacagtgtatattatgaaagtatcaacaacactttgaaaataaaaagcacagatgtaatacacacacacacacatacacaaacaaatctggttcttgccaagatatgggaaatatggttcttaagatgtgtggagacttgtgtgtgcacaagtgtgtgtatgtgtgcatgtacatgtgtgtgtacatgtctgtgtgcatgtacatctatgttcatatgtgaccaaggtacatcagtatgctgtgtgtagaatacagatatcaaccttgggtgccattcctcaggcaccatatgccgtgtttcctccacacaaagtcttccattatgacgtgaggctgttcactgagccccagggatacattcacctcccaggcatgtgctactgcacccagctctttacacagatgctggggatcaactcggcttctcacccgtgtgcagcagcctctttattgagttattttcccagtcttctcccacattttttattagatacaacaatacagcacacttcaataacagaaaaaacggccataattcttataaaagtctctaaggttttagattcgaatattaatcctcgtttgatcatgagctggtaactagcagtttttcagccaacatcatccagcctagggaccagcaccaggttggtgctgccttagaagaccgagtcgggactttgccagactctaaaccaaaagtcaaaggcgttatgttctggctgcctatggctggtggagaatattaaccctgacctctggcagtaagggggctgccactgaaaaccgagacattccagagcagctcctctgagttgagaattgggttcctttcaaataccaatcttcttgaaggagactaccctggctatggcactgaattgatccttgactctgaaagcccaagctaatgtcaggatggtcatgatggaactggtaaaaagccagataggcaggagcagcgcaggacagtggagagccaggtcctagaagagaatctgataggaaatagcaagtgctatttaaggaagaaataaaactagaaaaacctggtaacagcaactcatcgtgcaaacgtatgcttttgttctcttagcaactctgacatcagtcttttacaccttagttagtgtaaattgagcaatcaagccttttgttctattcctggacagccaggtataaagcgtcagtcaaacaggccattcaaaaaagccacgtgggaacctattttacaagtatatatattcttcacctaacctatgtattcatagaatctatatattcatatttaaaagtttaattagagttactctacatagaggataataataatgtttctcccagaacccataacaaaaacaaaaagccaagtaaaggtgtgggttgatgcccctcctgttgtttgtcatgggtatcctagagactcccaaaacaatacaaactattgccattgctcttgattgccccccagaacctgatggtgagtccttattctggtagatacaggacacagaaatattaagttggccctacccaggaagcttcttccctgctggccacctttcatagtatctcaggaacaatgtgagctgctaggcgtggggtgagccatcaacaccttacccagcggagagttctgtgagccacaataatgcctgtcatggcaatatatacccatgggtacagtagtagcaataatatcacagttatgaacaatctgatattcatcaatattctgattgaatctaaggcccactctataggaggagctgcctggtagttggtattgtatctgtgaccaagaatccatggttggcgagctcagaggtcccggtggtgaggctactacaatgatgttgctaaagggacaacagtaccaatcatttctctaaatttctatctctatcttcatagatttctgcagctcccagaccccatcatgaagtttctttgtgcagtggacagtggttagcaaagaaactcataatggctcaaagttcagagagtaattgtctatggtgaactcagccaaaataggacatcaatatcgcacccttacctctttaggtttacagactgtcttagttaggctttcactttctgcaacaaaacaccaaagggtttatttggtttatatttccacattgctattcttcaccaaaggaagtcaggacaggaactcaggcagggcaggaccttggaggcaggagctgatgcatgcttgctctacatgctttcttatggaacacaggaccaccaccccaggggtgccactgcctatagtggactgggttcttccccatggatcactaaataagaaaatatcctacatctggatcatgatgttgtagaaaatatttaatctcaatccaggttttctactccacctttgaccatttagttcccagataaaagatactcataacctttatatttacaataagccttaatcagcacaagagctgggcagatatttattctccatgctattatgtctatttcctagccaataatcccattaaataatctgccatgttttgtctgggctgctcttaactccagttagccaacccatgtggccattatttcaagattcttaccccacctcagcttctcctctctccaacttcttctcttcccacctcgtggttctcctctgacccaagcctgggaaccctacatcccgcctatgcctcttctgctcagctattggctgtcagcatctttattcaccaattagggataacttgggagtcaaggtcacatagcattatgtgggtctatatgtggtctctgggagtaaccagtatttcgcatagcaaaagaccaaaccttaacattatggaggcatttcctcatttgaggctccttcttctgcaatgtctctagcttgtgtcaagttgacacaaagccagccaggacaggggtcatcaaggagtaagaaacacattattagaggcggaagttgggaaggacagatctagaatagtgttttccggacattaatgggaccactacactcataagtttacagcagctatagagacctgtataagacctgaactagaggatgccttcacaacatttcagcacagatcagggaggggctcgtgaaccccatactcagctgagaagttattgacaggtgatgtcatctgagggagggaggatcagtgaagggtatgggctctggtatgttggccatgctccagtggatggctggatgtcagaggtgggaggatttggagatagaggggtggtccttggggggggggtgttatgggaagatgaatacaacccaaacccattgtatgcatgtatgaaacgctcaattaataatgagatatatatatattggtttttcgagacagggtttctctgtatagccctggctgtcctggaactcactttgtagaccaggctggcctcgaactcagaaatccacctgcctctgcctcccaagtgctgggattaaaggcgtgcaccaccatgcccggctaataatgatacttttaaagtgaaaagagaggagtaattctgaagctagacacttgtgggagttttgttttatagacaacaaattcccccaccacaacagagaagtgagcagagccaagggtgagcagcttgcatttctttctcacctcctttgctatcttagcttgagttgataaattcaattctctcccaatctccacgggaattggttctagtctcacttagattagggagtcctcacgtcccttagggaaaatggcccaatgtttgcagataacctatatacatcttcacatgggcttgaaataattctgattcctgaaaaatacctatgacagcgcagatgcgagctttgtaaatagtagggacattgcattgtttatggaacaatggcagaaaagaagagtgtattggtcacttttctcaatgcagtccccaaagaccagacaagaagcagcttaggtcatggttggaggggtgatagctcatactggagagggaagccatggcagtgtgagcatgtatgacaattgcttgctcacaccgccctaaggccagaagctccagaggaacaagaagtagagacgagctattaacctcaagaccaaaccccagtgacctacttccttcagctaactcccacctcataaaagtttcacaacttcccgaacagcagcaaccggggaccaagtgttcaaacatggaagcctgtaagggacatttctctttcaaataacaaccaaaagtttatgctggtgtcttttaaatgtctgctctgggttatttattgtcagataagcttacctcaagctgacttttctactcatggagaaggtaatagtaatggaatcataaggaaggggagtctagagcaggggtacccaggcctcctaatcctgacaccctggaatacagctcctcaccttgtggtgagccccgaccattagttattttcattgctacttcatgactgtaaccttgctcctattatgaattgtaatgtaaatatctgatatgcatgataggtaggaagtatatcaggttctagggattccaggaacctcctcagaactctttaaccttgtctgtgtagatacaattgtttccacccctgaccggtacttctgaggtgagcttaaaacatctaattctgagccttcaaacatggaagactctgggtaagaacccagtcttaccttctctgacagatcttatttcctatattataaatatatagggaatatataaaatatgaagtatgtgtatatttcatattttaaagcccccccccagtttaagtatattttgtcctacatctttttagcaatggtctatcaccaagatctgctaacccagtgaaggttccagctccatactctgtatggatgttttccctgaagggcattttgagaagaacacaacatggctgtgtccggatgggttcacacatgctctctcgttgcacagcttagcgaccctggctctggctctgtttgaggctctggatagattgtcatgtggaactagctgccgggggactctggtacttgttgccagatgagcatccatgggaaggtacgagatggaacaatgtggtgttgatggtttgaagtgtgactttaacagtgcactgttgagtttttatcttgtcacagttaggattactattgctgcaataaaaccccatgaccaaaacgcaagttggggaggaaggggtttatacagttatatacttccatatcactgttcatcatcagaagaagccaagacaggaactgaaacaggacagaaacctggaggcagaagctgatagagagaccatgggaggggtgctgttcactggcccgctgctcccatggcctgctcagccttctttcttatagaatcgagggccaccagcttggggataacaacacccacaatgggttgggcccttccctatcaatcgctaattaagaaaatgacttattgggctggagagatggctcagcagttaagagcactgactgctcttccggaggtcctgagttcaattcccaacaagcaaatggtggctcacaaccaactgtaatgggatctgatgccctcttctggtcggtctgaagaaagtgacagtatactcacatactcagctgcagtacaactgggtggcagttttgcaaccaacagtgattaagaaatacattgtggggctagagagatggctaggtggttaagagcactgactgctcttccagaggtcttgacttcaattctcagcaaccacatggtggctcaggatcacctgtaatggaatccagtgcccttttctgttgtgtgtgaagacagcaacaatgtactcatatacgtaaaataaataagtaaataaaacaaacaaatcaaccaatgaaacaaaccccactgcgtcaccagagaccatgtgggtgtacgagtgcagcactgctgtgcccatggtggtatccaggcctatgctgctgcctggagtcatgtctaggactgtagtcctgtcccagacagggtctgtgttgatgtctgaggccgatgttaccaataaaatgttgtgggatgccagcctacggcctacgtgaaccgggtatttctggaaggcaggctggggctgaaagagactagactgtgagaaaagaatgatgaagccaagacaaatttttctctgatcaaggctcgtgagtttactaagagagtgtgcttataagggggaaggcccatgtcctcccccgcgccccacccccccagtccatccttgcatccttggtgctttgtcgccatgtcgccatgctgtcagcacttggttgcttattcaggaatgtctcaggaagataggtagcagaatctcagggcagttgacacttcaaaagaagacagtcaagtcagaaagctgcaccgcaggtggccccacctcagtggtgacaaggtctgtaccagcctgcttcaggttcaggctgggggagactacaataaaaggccatgcagacgaccctggtctgggctgcctgaggccacgttgatgttcaagcactatgctgagctggcaaccataccatcccttacgtaggcagtgtgcgagagacggctctggtgccgtgggttcagaagagctgaccatggtggcaggagggcaggagatggtcctgcccctcaccagctgcagcccccaggtaggagagtaggccatgtgcctcatctgggcagcagaatagagattatcctggtgataggggagcaggcatactggccccatcacttgtctgacatggggcagcatgggtaaaagagaaatgcccccttgcccctcaccaactacttcaggtggaagggctggcccccaaatcatgagagcaggagagctgaccctacttctcactggctacagtacccagagagggtgtcctgcaccttgcctgggtagcagagtagagctgggcccctgcaaaagagctggccctgcaccttgcctgctgtagattgggtgagctagccaggaagtgttagagagcttgccctggtggtgagtgtacaggagagcagagaggctgaccaactcatctaccacccaggctcagatgtagggttttgaattggcttgacctcaactctgaactgctggaactgtagggatgctcctacaaatctaaagctgcagggtctccatgacacagggcaacaacaggctgtccaaaggagtccctgtaagggtccagcaggagccagaagccatgaaccagaccaaagtctcatggcaatgttcatttgcaagtaaatagagtggaccaaagggagttctgtgggactgtgggacagacacactatgacacactatagcttccacagcaagggttttattttggttttttttttttttttttttggtattttactttattctagtttattttattctggggtaaaggttgcaagagcagaggtagatactaagggacaggaagatgaatggggttggagtacatgattcacacacacacacacacacacacacacacacacacacacaaatcaataatttttttttaaaaaaactattcattacaaagccaaaacaaaattctgattaaaaaaaaattctttctaaatgccccatttgataagttggaggtttttaaatattccatactaaagtcatcagaggggtttcatgcaacaactgatgggaacagatgcaaagacccacagccagacactagggagcattcagggaatcctccagaaagcagggagggaggactgcaggagccaaaggggtcaaggacaccgcaagaaaaccacagaatccactaagcacagaaagcagggagggaggactgcaggagccagaggggtcaaggacaccgcaagaaaactacagaatccactaaccagggctcatagaaggtcacagagcctgaactgacaaccagggggcctgcgtgggtctggcttcggccctctgcatatatgttatggttgtgtagcttgatcttctcgtgagactcctaacagtgagaatgggggctgtctctgactcttttgccggcttttgggacccttttcctcctactgggttgccagtccagccctaatagatggggaggttcccggtcttattgcaaattgatatgtcatgtttggttaataacccttagaggcctacccttttctgaagggaaatggaggaagggtggattgggggatggagtggggaaaggaaatgagggaaagaggaagggtaaacggtggttgggtgtaatatataagaaaagaacaaaatttttaaattatgtaaaaaaaaaaaaaaccaggaatacattatgggactatgagctgtcagcaatgaagcaggagcaatgacgtcttttgatggcgttggcaggctcacagctagaaccagcgcaagagacaggatgtgctgtggttgtcagaagggagggttccacactcctgcaggctggttgagtggaaggcgtagggcttcaaatcagggcttctgggacccgcataggcttgggtgtagagcgaagaaaggccttgtgcacacagataagcactgaagaagccaggaaaggtaaacacacggcttgcctcttcgatggaatgaggtgtgcagatagatgctcttcctggaacgccaggaatgatggagttttataacctggcgatcccttgctgtctgatgagacaggctctgctcgtatctcccagacttcatttcttccagacaataccctcccccttcaaaccttgagtaatgacttttagaccacaaaacccatcctcatgtgggatgtcacctgtgctatcttagggccaggccaatgctgacacccacaggccttatgtttacctcggccattcttacctagaccctaaatctcgggcactgtctctgagtcaacagtacctattcctgtgaaagaagccagatgtgttttgtaaagaatctcagtgtaagcatggcttaaattattatatactcgggactgagttcattgttctctgaatactttttttttttaaattgtgctgtgcttaaatatggctaaagtaaaatgatctgggacagactctagaaatcctggttcatcacccgctacaatcaaatcagcctgaaccaggttttcctcttgcctcaccctgatcattttttccttgcctggtataaagcttgcaggggaatggccacacgtgagttatgtgggacaaatggaatgtttacctttcttggtaagatccccttcttttatggtttagcactcatgtgatgtggcacttgagttgaccaaaatgatatagagcaatcagaagactttgaaatacctctgtgtcagaagcttggcatgttcaagctgctgtgtatagcaccacaattccaaacccaccagttatgaaaactgttagtgttctgtctaagctcctctccacagttacctggcaacagctaggtaggcctgatccactataaaaggggcttcttgccctctcctctctctgttgctcctctcttactcttactctcttgatcttgctctgtcctcttgtcacttctcccccctccccctctccctccacatgctcatgaccagcctcctctctctctctctctctctctctctctctctctctctctctctctgcctttctctgactctactaccctcttttttttttgttttttgttttgttttatttttgttttgttttttgagacagggtttctctgtatacccttggctgtcctggaactcactttgtagaccaggttggcctcgaactcagaaatctgcctgcctctgcctcccatgtgctgggattaaaagtgtgcgccaccacgcccagcctctactaccctcttaactcccctgaccatgccccaaataaactctattttatactatactgtcctgtggctggtccctcagggggaagggatgcctcagcatgggccctcagaggcactgctttcccccatacctgactacatctccatagaacatatcccccctctccttatctttttataaacacatcaaaaacaaccccaggaagcctttgtctcatccgtaagagatagcaatcctcagtacaaaattcgatggaaaagaatgaacatgggctctcagactttttcccacgcctaccagcaattgatctgaaagcaattactgtaggcccacagcctgggtacagagccatgggacaaactcgggaagttccacactgaggtctgattacaactgagctctgaatcagcaattagattttcttgacccagcaaattttctcatccgccttggcgagcctgattaaaatacccatttcttcagaaacgaaaatcccaattcctataaaatgatatccttgacccggaggcacctgcttgtgtaggtccgataggctcagtgtctttcttcagtgggactccttcaagtactcaggacagggaagacgtgggaggggcctgagagcagaggtgacaaactctggtctccagcaagcaagcatgtgatgaaaggaggggaggaggcctgaggtgaccagacagggcttgggcaacctgccagctcaactctaactctccactggcaagaagacagacatggaggtgtttatggaatgtctgctagttattaaatgctagataaaaaattaccagattagccaactcacacactggggacctatttatagcttcatggctagaagtaaacaaaccgctaacagcgaggcccgaggcatggatcatttagggtagagacatatttgagaacaccaagaacacataatctcctgaatgtctcatcctctcgcatgcccacgtgctctgcggtattagaacgtctttgttgagtcaacatgatcatgagtattttggttttttgttttttaattatttttcttttatttacttttttttttttttttttttgatcatgagtattttgtaacagacatttaaccatataatcagaaatgtctcaggcctccttatctgacattctgacagtgaagtaactggcagagaaatgagatagctgggaaacctggtacctgttgtcctggggccagggtctctccagagaaacagagcctggagtgggggaggggaaagcagcagagggaaagagacaggtagattcattttaaagggtcagtgcccatgactgtggggagagtgaggctgacctttgtgcagtaggccagcaggtcgaaacagaggcagagtttccatatcacattctccaggcagggtttcttcatctctaggaatttgttctcaaggtctcacctgattagaaggaagctatattggcatataagctatgtagaatttagctgatacaacacattaattataactgtaaagcgcatggcaacatcaagactagcatttgataagattgtgggccctgtagcctatccaagtagatatgacaaatgaaccaagagatgagggagcagccatcttggccatgcacttggctgagagcatagagtaggccagcttgttggaactgccaaagcctttaaaaacagaagtaaagggcctggagagagctctgtggttaagagggtttgcagctcttgcagaggacctaagttcagttcccattgtctctctcactgctgcctgtaactcctgctccagggcatctgacaccctatgaagtgtttcattatagtatagctgtctggggtccatagggtgggtgttgggtaggggtcctaaagtagtgctggagagaaacttagagtggggaaatgggagggtgtatcatgaaaggctttgaaccctgctggtcccgatacatagattactattttttttaaaggtggtttctctctccagtctactttgagaggttatatgtatgttctagtcaatgatttatttatttttcctgtttgtggtctcttcttcccagatctggacctgcggtcttgggagttggaaggatctgatgggaaaccctcaagagacttctggactcaaagtgagaatcttgcaggacctgccatttgcacttttgaaccctttggacggtgacccagggctccgaagaggagcttgtaagactgacaatcttccctctgtctcaagactctctgaacagcaagaccccaatggcactttagacttacccctgggatcctggaccccagtgagggcctaaggctcctaatgactttcagggtgagaacaaaaggaattgctctccgccccacccccacctcctgctttccgcagggagacatggaaattcccagttactaaaatagattgtcaatagagttatttatagccctcatttcctccggggacttggaagcttcagacagggtttttcataaacaaagtcataactgatgtgttttacagcatcctagaatcctggcagcctctgaagttctaattaactggaagcatttaagcaacacgttaagtacccccactgtggtatttgtttctacttttctgtttttaaagtgtgagtcacaaggtaattgttgtaacctgtgatatcactgtttcttgtgtctcttctttcaactacatcttttaaaacaaaacggtgtggggtttggttgttttggtggtagtggtagtgtttctcagtggtatctccttaagaaaaaaaatcatcatgccagtgaattgtttcttcagccatttcagatgggaagctggaatagcctgtcccccaagctaagccttcttccctagctttctgcgtgattttacattgagcattcctgttgctttgtttctataactgtaatgtggtgatgtcattgttagggcacttgagggtgggcgttctggaagtcctttcaggttagtgtttgggggcagggttgctcagaatacataaaggtgctaacttaaactgcagccatggagctcagtgaattcactaaccttcgggctgtccaaatgtgcacattagctactgtgacccctgtaggttagggagcctgaagccagctctttacctggtgtttagactcagcagaatttggagtcaatgggaccaaatggttgtgaaattaagatttgaagtgtgcatcttattttatcaccatctgcccaacaaaacttcagaaaatgcctttgaagcacaaaaatgtaatcgtttatgtgaaatctctgagttgcatttagatgcccattgcagcaaggtggctctctcacagattccacaccttagcctaagataccagacagcaggacagagagaaaagtccttcctggtgtgcaaacttccttacactggacctcgcctctcaggtgtgtgattggtaggccaaatcccgatagccaatcggtgttgggtgctttgtctgctctactgggagtccagtggtacaatggattctggcaaaatgctgccatcttggccctcgctgggctgctttctaggatattcatagagaaagggccgtccagatccagtatcctaaaatcctgagaggagaatataagttagtgtgtctcactataactatctctatgatcggtcacattactatctaacagttaccaaatactatatgcctaatactggtaagcattttatacacaccattggattgaatcctctcaaaatcctcaaaaaggaagttattaatacctccataggcaaggagcccagaacccagagaggtcaggcagtctagttatagatgcctgctttgtttagaagtgaacaagagcatcaaattattaatgtgccctggttattaatgcgccctggttacctgctggatggaacatcaaggtggacttttggcagttgcatacacccagaggtattttggctattcacggattaatttcacacgaagtgtttcagagacatgtgtannnnnnnnnnnnnnnnnnnnnnnnnnnnnnnnnnnnnnnnnnnnnnnnnnnnnnnnnnnnnnnnnnnnnnnnnnnnnnnnnnnnnnnnnnnnnnnnnnnnnnnnnnnnnnnnnnnnnnnnnnnnnnnnnnnnnnnnnnnnnnnnnnnnnnnnnnnnntcaaaagaatgagcagtaaaagaatggtgtttactgcctgcctttatcaggcagtgaacgtgcagcgggcaacgaatgcttgataagtgtgtgtcagtgtgaagtcccatgtaccagccgctgtccccactgcaaaagcagcagagcgctcagacatcatcagctgatttaccagcagcagatttcttcttctagtcccatccctgaagaagcttccagcctaggtacattgcatgggctttgtgctccaggagttcctacacagccctcaacttcaacacaggcaaagtgcttactgatcctcatgtatcttacagggtcccctctacccacaatacctcattgctggaacttcaaatcttcctgaataaaagcttgcccgtggtttaattattacctatactaggagattttcctccagctgtctttcctttggacacagaaatgtgctcactttctctgtctctctgtctctgtctgaatctgtctgtctgtctgtttctgtctctctccctccctccctccatccctccctatctctcattcccatccaatgatgcttacatgttttcgtttttgaactctgaggactggagcacacgttatctccccgcttggactccttgaaagcagagagaaaagaggatcttcccatgcccagagcaccttgtgtgagataggtgctttgtgtgtgactgaccctgaaactttaaatattgaaaataacatgacgctcattagtctgactttttatgaccgtaatgtgattggctaaaaaagtaaataatgggaactttaaaaaatgtaattcaaatataatattatttctattcctcccttcccttcatctaaccccttccatggctccttcctccagtcctcctcatggctcccactcgctctcaaatcaatggcttctttttctttgactactactgtcactgacatgcacataaatatatgagcataacttgctgcctctgttaagtgtcgcttgtgttaatatgattttagagttgaccactttgcattaggaagtcaattagggggccatccccgggagaggataacattcctctttgtggtcttcagttgcctgcagtccttcacctcggactggtgacctttgtgactttcctcttccatattagcaagcctaattgctgttgtccttgatgggtctggttcaggcagtcatgtagttgaagaatcatgaacgtagcttcccagacatttctacaagacgtgatcccacagcagactttccggttctctggttctccgcactcttctacttccatgatgtcccttgagcgttaggtgcaggggctctattatatacatgtccgctgggtctgcacccagatggttagtttatctctgcatatgtaaaaggtaattttaaaaatttctttaacgtttaaatttttataagtatgggcatgtatatatatatatatatatatatatatatatatatatatatatatatatacatgtgtgtgtatgtgtatatgtatatgtagatgtagatgtagatgtagatgtagatgttcaaagaaagccagaaagaggctgatctattagaggtagacttacaggcagctgtgggaaacaggtcttgggtcctctggaagggcaggaagtgctcttaaccactgggccatctctctagccactataatggcatttttttttaaaaagtggattaattctttttagtgttttatatataagtgaagtaaaaataggatttagaagcgtttgaagatttgagaaagagcaatataggctgctctcattcaatcacaaatgtattgagttccattacttttatgtttgtctatttatgaaggtatactttattatatttcatgtaattttctatcctttgaaaaaatctgttatgaatcttaagctagcacatatgctgctggctagttgtaagatattcttcgggcaactgtgacagtgtttgcttaaaccttcctcagcttctggaagatggtagcctgtgacacacacacacacacacacacacacacacacacacacacacacacacacacacacagaacacagagcaaactccatatgaaagtcactgcccccgctacatctctttcactacttttagagtgaatgttaaccacatatttccttggaaattctcaagtgttccctaaggtcaattcttacatatacactggccggtgtgtatggatcttaacagtgttctcctgttcagttcatggggtcagccatggggcagatcagagggctagagaaggctgatctagacgttttctccaggctttccctccaagggccattgctgactgtcttgcccagagcccagagcccagagcccatgaccttctccatgcggcttactgtgctgctgggttccagtaactgctgcctcccttccccttttcaagattaggtgcctaggtcagtctgtctgtcttcttgtctgtctgtctcttactctctcagagagaaagatatagacaggcaacctgcctgccctgtggtacaatactatatccagcccacacatttacaaagactccctttaattaaaagttcacattttccagttccagaccttggctggtaggtcaagctatttcaaagaatgtaatttctttttcttaggtaaagagtgggtactctagttatgcactgctaggattgttctggaatctgtgcccatgcagactaccttcactaagaactcggaaaatacccctgaatttgtgctgttgttattgatattgttatcatgggtgtggcgagcacaagggtccacatagcgcaatgagatttgaagttctttgaaatgtacttcctgtttcaaggtattttgtgagcatgagctgttttatgaccttgtaaaaatagagaatccaggtggtgaggtgcagacagccagttaattgtatttgttttgtgactcaggagatcacctcactgccatcagaagggcacccatcctcttaacacatctgagagtgtttacagaatgagtctgaggcttagcaggtacaagtgcttgtcacacaagcccggtgacctgagttcaaacctcagaacccacagtggaaggagaagagaaaacccacctctgagagttgctctctgacctccacatctgtgtcatggtgtacacacaaacacatgcaaattacatataaaagttgctatcttgtgtcttagttgttgtgtctttattacttttagagtgaatgtgaaccaagtatttccttggaaattctagagcattccctaaggtcaagtcttacacattgatttctgattgattggcttggttagttttgttttgccatgtagtgcggttttgttatcttgacttcttcggggtggttacaggaacacaaatttgttgggaagttgagcgtctcaggcttcttaggtggaccacttactttctggcgtgctttgtattcacattgctactggatgctcttccaaccctggggatgcttaaggcttcactttgcctatgtaacaggttaaagcagtgatacttttacgttttcctgttttgatcacccctggctttgatcctaagcatcactcttcctgtgaccttggaatctgagtgtagtctatcctccccttccctgctcagcctctagctaagtgtttcatttactcaataatttaatcattttgatacattattttgttttaagctacagtgtcttcacctatctatggacttcctaacaataatacccctctcactgaactgtcctatgaagatgatgcatacctgatttaaaaaaagaaaaacctatccaacaaatacagaagtggatgctcacagccatccattggactgagcacagagtccccaatgaaggagctagaaaaaggacacaaggagctgaaggggtttgcagccccatagaagaaacaatatgaactaaccagaacccccagagctcccagggactaaaccaccaaccaaagggtaaacatggagggacccatggctctaggtgcatatgtagcagaggatggccttgtgggacatcaatgggaggagaggcccttggccttgtgaaggctcgatgtcccagtgtaggggaatgccatgacagggaagtgggagtgggtgggttagtgagcaggaggaggggtaataaggatagggggagtttcagaggggaaaccaggaaagaggataaaatttgcaatataaataaagaaaacatctaataaaaaaactgttcaagaaacatgcatttctttccttaataaatatgaattaagaatgaataaattatgtaaattttgaacaaatgattgtgtcaattttctttgaagtttatgttaagagttaactcataaattagtattttgatgatctagatagtccagtgctatcttatttgtggctttagattcttcactgtctttgattaaaatctttgaataattatactttgaaattatttttattagtcaagatatatctcagtaaaataaactctgacttacagcaaagttggaatagagggagaagctagattctcacttgtagtgagtcatatctggtttctagtctgtaattcaaggtaggcttttcaaatgacacagacattaattcatagagccattccccaccaggattcccgtgggttgacacattctgaatgctagatgatagctcgtcatttctattgaaatcagcaagtccaactccgtggtgatgtttcccaccacaccatgcttagagcctgttcacactgctctgaatcagctcactgactgaattctcagtacttcagagaagccactactccctgttcctcatggtgacccaaggggcaagacaagatacataattatacatgaccaggtggtgagtttgcatcacggaatatagcctactcttatgctcatattccaaccactcaaccaagaaagtaaaaccttttccaactgctaacatatttgtctcatagcttttgctgtcttacaagctaccccaaacgcagagatatctgcaaggtgcataataaacagacacagactactggcaggcaatttttcaagacttaaagttgctctcttctctgtctctctgtctgtctctctctacctgtctctctctgtctctctgtctctttgtctctctctctctgtctctctgtctctatctctgtctctctctgtctctatctctctgtgtttctctctttgtctctgtgtttctctctttgtctctgtgtctctctgtatctgtctgtctctgtctgtctgtctgtctctgtctgtctctctgtgtctctttgtctctttgtctctctctatctctgtctctccctatctctgtctctctctgtctctgtctccttctgtctctctctgtttctctgtctctgtgtctctctgtatctctctgtctctgtctctctgtgtctctctgtgtctgtctctctgtttctctctctgtctatctctctgtctctctgtgtctctctgtgtctctgtctctctgtttctctctctgtctatctctctgtctctgtctctgtctctctctctgtctctttctctctctgtctctttctctctctgtctctctgtgtctctctgtgtctctgtatctctctgtttctctctctgtctccatctcccactctctgctctctctctctctctctctctgcttgagactgcacacattctgcattctcctgcgcactctgcttttctcctgtgcacttttcttttctcgaactcgcacactcctacacacctctgtgcgttcccctttcactcacacacacacctcacacacatctcacacacaccacatgcactctcctttcactcacacacacattcttctcttcacactttcatattttctccattcacttcacactctgtccacacacacctcacattctctcttcactctcttcacatttgctctctctctctcacacacacacacacacttctcgtgcacctcactcccacttcactctctctccactctctctccactcgctctctcgcctttttcttgccccagtcttttactgatactccaaaagcagggagagaaaagacattgtattctcattgccaaatcaaattcaaaagaataaccacatcccacaaagaatcaagaattacagttgttccccaaagtttcaagcttacccctatttccaggcttgtggccaaaataataattgcaaagtcatcactatttaaactttaattttttttaacttatacttcagagctcagaggtccgaggtcagctacgtgtgttttcttgtgaagctctaatgataaatgacgtgggcaaagctggcaggcagtggccagaaagaatcaacccttaacccttaactcagcagttctgctagctttctgcttctgcacattgcacacaacgactctcctaagagtctcagtgttttgacttagttttactagtatagaattatatgcattctacaattgcttatccaggaaccactctcaaatgttgtgcaaaacttatttcataacttcaacagctttgccttccttgggtttccaatgttggctctaattcattttctaataatttcttcaaactttctttgcaagtcaagcattaatctggaactcccattgtgcagttgttacattgtttccaagatgagaacacacagcaggcacctgggtcattaggactgtgctgtgctgtgccccaagcctcaatttttaattgtgtaagaatcattgcatctaggaacatcgagtttcacagaattcaccagagcaggagaaaggagtaggaaagtcagatataatagaataattatgcagaccaaggccaaccgaaaagcagtcacgagcagatgaattctatacaactgttgtccaaggctaagattaggagaaatgggaacaactgttgtctacaaaagacagctgtgagctactgacatgtctccaccctggcctactgcaggcagtcccttatttcaggtggcaggtcccctggagggatgtaactactccttctcaggttcccaggcaccatcctttttcacaaggagctgccacaggcttctgagatgtctccatccctttctgcccctttccctctgaaagagacgggaatcctggagtttatgagaaatggagacacccctttcgaggccactgctcatatgtggttgtatcagagtttcaagcaaaagaaagttagtgtctgcagatgggaaggcgggacttccttcattatgaaggggagatcagggacagactcaggacaagtgtgctcaaacattcactcctagcctgagtccaacgccttccaagtttctgttctccgtgcatctgccagctgcggaatgcttggtttgcttctgaatccttagtaatatttagttattcctgcaaccagaaagaacacgatatattttgaacgcctgcttagaaccccctactggtgctctgcctacggttttaggggaaatctctgagcttgctgctttcttcctgcacacacactaatacagaagcagccacatcacctcgattcctttatgaccttatctttactagaacaatgctccaatataacagctactcggtttccaaaaattctacttctccatcaagcctccctcgggtctcaggaagctacgaggaagaggaggcaggaaaaccgtaaatcggtggggatggacgacaccaaggaaataagaccttctagataagagagcagaactgatgctcgtagaagctcacagacaccgtggcagcacgcacaggacctgcacagtcccagtactgagaggggaactggacacgaggcccatccctcaacgcagaaatgttctccaatgaacagccattcacagaagaaaaatcagttttctccagtggagtctcactgggtgtacacacaacacttaagggaggttccatgcccagcagcagacttgcaaacacaaagcaaactgcatggtagtttttggagatgttatctagcaatactttgtttggtctgtttttttgtttttgttttgtctttcctctttataccttgtcttttgcttttctattatgatctctgatttttttgtgtttttatgggttttgtgctctgtgtgtgtgtgtgtgtgtgtgtgtgtgtgtattcatgcaaatacatacaagctttttctctctcttttttttctgtttctttgcttttattctggattgttttattgtttattggcttattttaaaaggtctggggtcatctgggtgggcgtgagaagggtctgagaggagacgatggaagggaaactgtgatcagaatactgtaggaagaagtattttcaattaaaaacagttagaatggagctggcatggtggcgtatgtacgtgatccccgcacttaggaagccaaggcacaagaacctcgtgagttgggagccaccctgggctataaattgaaagccagtctcaaaccaaaagaggaaaatcatatgcaaagtggcttatg

SEQ ID NO: 259 - DNA, 1621 bp, Mus musculus
gtcaaatgtggcatatctttgttgtctccttctgtctcccaactagagagaacacacttacggctcctgtcccgggcaggtttggttgtcggtgtgattggcttccagggaacctgatacaaggagcaactgtgtgctgccttttctgtgtctttgcttgaggagctgtgctgggtgctgatattgacacagaccatgctgctcctgctgccgatactgaacctgagcttacaacttcatcctgtagcagctttattcaccgtgacagcccctaaagaagtgtacaccgtagacgtcggcagcagtgtgagcctggagtgcgattttgaccgcagagaatgcactgaactggaagggataagagccagtttgcagaaggtagaaaatgatacgtctctgcaaagtgaaagagccaccctgctggaggagcagctgcccctgggaaaggctttgttccacatccctagtgtccaagtgagagattccgggcagtaccgttgcctggtcatctgcggggccgcctgggactacaagtacctgacggtgaaagtcaaagcttcttacatgaggatagacactaggatcctggaggttccaggtacaggggaggtgcagcttacctgccaggctagaggttatcccctagcagaagtgtcctggcaaaatgtcagtgttcctgccaacaccagccacatcaggacccccgaaggcctctaccaggtcaccagtgttctgcgcctcaagcctcagcctagcagaaacttcagctgcatgttctggaatgctcacatgaaggagctgacttcagccatcattgaccctctgagtcggatggaacccaaagtccccagaacgtggccacttcatgttttcatcccggcctgcaccatcgctttgatcttcctggccatagtgataatccagagaaagaggatctaggggaagctgtattacggaagaagtggtctcttcttcccagatctggacctgcggtcttgggagttggaaggatctgatgggaaaccctcaagagacttctggactcaaagtgagaatcttgcaggacctgccatttgcacttttgaaccctttggacggtgacccagggctccgaagaggagcttgtaagactgacaatcttccctctgtctcaagactctctgaacagcaagaccccaatggcactttagacttacccctgggatcctggaccccagtgagggcctaaggctcctaatgactttcagggtgagaacaaaaggaattgctctccgccccacccccacctcctgctttccgcagggagacatggaaattcccagttactaaaatagattgtcaatagagttatttatagccctcatttcctccggggacttggaagcttcagacagggtttttcataaacaaagtcataactgatgtgttttacagcatcctagaatcctggcagcctctgaagttctaattaactggaagcatttaagcaacacgttaagtacccccactgtggtatttgtttctacttttctgtttttaaagtgtgagtcacaaggtaattgttgtaacctgtgatatcactgtttcttgtgtctcttctttcaactacatcttttaaaac

SEQ ID NO: 260 - protein, 239 aa, Mus musculus
MLLLLPILNLSLQLHPVAALFTVTAPKEVYTVDVGSSVSLECDFDRRECTELEGIRASLQKVENDTSLQSATLLEEQLPLGKALFHIPSVQVRDSGQYRCLVICGAAWDYKYLTVKVKASYMRIDTRIVPGTGEVQLTCQRYPLAEVSWQNVSVPANTSHIRTPEGQVTSVLRLKPQPSRNFSCMFWNAHMKELTSAIIDPLSRMEPKVPRTWPLHVFIPACTIALIFLAIVIIQRKRI

SEQ ID NO: 261 - DNA, 80988 bp, Homo sapiens
aatggagcctgtgggctgcgttgcgaacaatgccggcttcattaacataaaaacagcattcttcttggacatatacacatgtgccccaagacaagaatgttaatccaaactgcaccattttgtaagcgccctgctattttgcagaccttggtaaaagtgacacatttcatgggtttttgggccatgagaaacaccctgcctaaccacttgaccacaaggcccacaaaggcccaactaaagaaatatctctatcatatccttctgggcaaaggtccaaggaacaccacgatgacatcccgcctgaacaaggaccagaactgcctcatgacgggaacatcttatcaatatcctaccgggcagcaagccatactgcccagacccctcccgcccatacctataaattaccccagcctgtaagcagcggtaggcactggcgttaggctggtccccgacttctacagtgtgcatatttctttaaccctcgccttcccttcaaaacctaacagggatcagcctgggcaatatggcaaaatgccatctctgcaaaaaaatacgaaaattagctgggtgtggtggcgcatggctgtggttccagctacttgagaggctgaagtggtaggatcgcttgagccccgcaggttgaagttgcaggcagccctgattatgccactgcactccagcctgagtgacagagtcagaccctgtctcaaataaataaataaataaaaataaattagaaacacatacagccctttgttgatttctttaaatgttttcttcttgttatttttcagtaatctaactatactctccattattgcttttaaaaaattatttctgtctttacaaaagtaatttgtgctcatggcagactatttaaaaaacaaaatgaagccaaagaaagaaaataaaaattaactgcaggagaaggaggcaagagagctaactagatgcagccaggagaaacacctctcacagagatcttcccagattttcagagggaaggcatcaagagtggacagagggaagacacagaggctgggctgaagcaggaggaagctgaaaaccctgcatgaggctaccacacactgggacttgttcctggcccccaacaactcctgcagaagggatgagttgaacaggcaaggagaaacatgctcttgcaatgggtctctggaatcacgacaggaagagacccctcaaccactgtggacacttgagttggcaaggagagctgcttagagaagtggtaggggcagagctccaggtgatgtggagcccagtaggtttcgtgcgggagtgtttgtggtggagtacagccagcgatgtccatctccctaggctcaacttgcttccataggagactttagcaccaggggagctgtcggtcctaaattctgcagggcggtgttgcccatgagatagggccagtctgacttcagcaccctttggtctgctagcctttcccagggccccagcctgtccatgcctgcttgcagtgcagccaccaggtacctcctgggagcccacatcatagcacctgtgctggcagaccatgccagactgtcagagtgctgcagcagagtagcccccatggacacacaccagcccacccagctcatcccctaactacagcctcccccttgttgctttgcttgcacacacttgcccacagccacccttcatatcactttgccagtacctgcgtgtacaggcagacctcaccttcccttccccaccagcatacgtgtgagcgtgtgccctgccatgccactgctgctggtgtgagtatatcctgcccctcctttccctgcagcactgtccactgtgatggcaatggcattgtcatcagagtgttgttgggcatggagctgccagctccgccccagccagtccccagccctgcccctatgcgaacactgcctatggcacaaaactaggcacaaaaaccagcaggcccacccctgccctgagcggccaatgcctcccatgtgaatgtgcacagggggcacacacagccctgcatctagcagcatcctgctcccatgctaatcccaacactggcacaaacatgtgtacagttgctggtgagggccccccaacctgcctgagccatgctgccactgctgcttctatgaacacctgcacgaaggctggcactccggcatccactagcaccttgctgcagccaacaagtgtgcaccccactgcaccgctgctgccactgcgactggcacatgcgactgaggatggatcatgtttccacagccctacaaagcactttggctggcaccatgcctcagagagttgtgatcagaggtccaggagcacctcaggcccctccaacatagcaggttcctaaccttaaggagccagagaacaagaccggggcctgataccagtgccccagagttataacacacagtttgggagtcctgagctgagacttgggcccctaaaatcttccagaaatgaagccagtctactgaacccaccttataccacaatcaaaccccgaaggtcattaaatatgatataaaaagggggaaaaaaaaacaaaaacagcaacatcaaagattgaaggaacatcattctacaaagatgagaaagaaccaagataagaactctaacaactaaaaagccagatggtcttctttcctccaaacaatcacactagttctccaataatggttcttaaccaggctgagatagctgaaatgacagaagtagaattcagaatattgataagaacaaagatcatcgcaattcaggagaacactgaaacccaatttaaggaagctaagaatcacaataaaacaatacaggaggtgacagacaaaatagccagtatagaaaagaatgtaactaaactgatagagctgaaaaatatactacaagaatttcataatgcaattgcaagtattaatagcagaatagaacaagctgaggaaagaatctcagagcttgaagactgactttctgaattaagacagacaaggagacagtcagacaagaacagagaaaaaagaataaaaaggaacaaacaaaacctttaagaaaaatgagattatgtaaacagaccaaatctatgacttattggtgtccttgaaagagatggggagaatgggagcaacctggaaaacatattccagcatatcattcatgagaacttcccaacctagctagagaggccaacattcaaattcaggaaatgcagagaacccccacaagatacttcacaagactgtccccaagacacataattatcagattctccaagatggaaatgaaagaaaaaaatgctaaaggcagctacatagaaaggaaaggccatctacaaagggaagcccatcagactaatagtagacctctcagcagaaatcctacgagccagaagagattggaggcctatattcaacattattaaagaaaagaaattccaaccaagaatttcatatccagccaaactaagattcataagtgaagaaataagatatttttcagacaactcaacgctgaggtaatacattaccaccaggcctgcctaacaagagttcctgaaagaagcactaaatataataaggaaagacagttaccagcctctacaaaaatgcagttaagtatatagaccagtgacagtataaagaaaccacacaaacaatgcacagaatggcaagctggataaagaagcaagacccaatggcatactgtcttcaagggactcatatcacatgcagtaacacacataggctcaaaataaagggatgggaaaaaatttaccaagaaaatagaaaacagaaaaaagcaggggttgcaatcctaatttcagacaaaacagactttaaaccaacaaagaccaaaaaagaagaagaagggcattacataatgataaagagttcaacaagaagatataactatcctaaatatatatgcacccaacacaggagcactcagattcataaagcaagttcttagagaccttcaaagagactcagactcccatacaacaatagggggagacttcaacaccccactgacaatattagacagatcatcaagtcagaaaattaaaaaagatattcaggacctgaacttaacactggaccaaatggacctcatagacgtctacagaactctccacccaaaaacaacagaatatacattcttctcactgcctgccacatggcacatactcccaaatcaacgacaccatcagacataaaacaatcatcagcaaatgcaaaagaccaaaatcataccaaccactctgtagaaccacagtgaaataaaaatagaaatcaagactaaaaaaaaaattgctcagaaccattcaattacatggaaattaaacaatctgctcctgcatgacatttgggtaaataatgaaataaaggcagaaatcattaagtttttttaaaccaatgaaaacaaagacacaacataccagaatctccaggacacagctaaggcagcgttacaagggaaatttatagcactaggtgcccacatcaaaaagttagaaaggtctcaaattaacaacctaacaccacaacaaaaagaactagagaagtaagagcaaaccaaccccaaagctagcagaagacgagaaataaccaaaatcagagctgaaatgcaggagaatgagacatgaaaaaccattcacaagatcaatgaatccaggagctggttttctgaaaaaataaataagatagatagactgctagctagactaataaagaagaaaagagagaaaatccaaataaacacaatcagaaacaacaaagggaatattaccactcaccccgtagaaatacaaataaccatcggagactactatgaacacctctatgcacacaaactagaaaatctagaagaaatttataaatgcttggacacatacacccccaagactaaaccaggaagaaactgaatccctgcacagatgaataatgagctccattactgaatcagtaataaatagcctaccaacccccacccccaaaaaaatgcccaggacctgatggattcacagtcaaattctaccagatgtacaaagaagagctgacaccattcctagataaattattccaaaaaaattgaggagaaggggctcctccccaggtcattctatgaggccagcataatcctgatactaaaacctggaagagacacaataacatcaacaaaaaacttcaggccaatatccttgatggacattgatgcaagaatccttaacaaaatactaacacactgaatgcagcagcacatcaaaaagcaaatccaccatgatctagtaggctttatacccaggaggcaaggttggttcaacatactcaaatcaataaatgtgattaattacatagacaggactaaagacaaaaaccacatgattatctcaatagatgtagaaaggttttttataaaattcaacatttctttatgttaaaaatgctcaacaaactaggtattgaaagaacatgcctcaaaataagagccaactatgacgaactcacagccaacatcatactgaataggcaaaggctggaagcattccccttgaaaaccagcacaagacaaaaatgccctctctcaccactcctattcaacatagtattggaagtcctggccagagcactcaggcaagagaaagaaagaaaaggcatccaaataggaagaagggaagttaaacaatccctgtttgcagatgacatgattctatatctagaaaacccctagtctcagcccaaatgctccttaagctgataaacaacttcagcaaagtttcaggatacaaaataaatgtacaaaaatcactagcattcctatacaccagcaacagcgaagccgagagccaaatcaggaacacaattgcacttgcaatttccacaaaaaaaaaaaaaatacctacgaatacagctaaacagggaggtgaaagagctctacaatgagaattacaaaatactgctagaagaaattagagattacacaaacaaatgggaaaacattccatgctcatggataggaagaatcaatatcattaaaacgaccaaagcggtttatagattcaatgctgtttccaccaaactaccagtgatattcttcactgaactagaaaaaaatattttaaaatttatatggaaccaacaaagagcccaaatagccaaggcaatcaaagcaaaaagaacaaagccagaggcatcatcctaccagacttcaaactatactacaagggtacagtaaccaaaacaccatggttctggtacaaaaacagacacatagaccaatggaacagaatagagaacccagaaataaggctgcacacctacaattatctgatctttgacaaagctgacaaaaacaagcaatggagaaaggacttcctactcaataaatggggctgggataactggctagccatatacagaagatggaaactagactccttccttacaccagatacagaaatcaacttaagatggattaacaacttaaatgtaaaacctaaaactataaaaaaccctggaagacaatataggcaataccattctggacatagaagtgagtgaagatttcatgacaaagacaccaaaagcaattgcaacaaaagcaaaaattgacaaatgggatctaattaaactaaagagcttctacacagcaacagaaactatcaacaaagtaaacacacaacctacagaatgggagaaaagttttgcaaactatgcatctgacaaaggtctaatatccagtatctataaggaacttaaacaaatttacaagaagaaaacaaacaacccaattaaaaagtgggcaaaggacatgaacaggcgtttttcaaaagaagacatacacatggccaacaagcatataaaaaagctcaatattacttatcattaaagaaatgcaaatccaaatcacaatgagagatcctctcacaccagtcagaatggctattattaaaaagttaataagttggccgggtgcggtggctcacacctgtaatcccagcactttggaaggctgaggcaggtagatcacaaggtcaggagatccagaccatccaggctaacatggtgaaaccccgtctctgctaaaaatacaaaaaaattagccgggcgtggtggcgggcgcctgtagtcccagctactcaggaggctgaggcaggagaatggcatgaacccaggaggtggagcttgcagtgagctgagatctcaccactgtactccagcctggaagacagagtgagactccatctcaaaaaaaaaaagttaataaacaacacgctgacaaggttatggagaaaagggaatgcttatacactattggtggagtgtaaattagttcaaccattatggaaagcagtgtggcaattcctcaaagagctaaaaacagaactaccattcaatccagcaatcccattactgggtatatacccaaagaaatgtaaatcattctatcacaaagacacatgcacacacatgttcatcatagcactattcacaatagcaaagacatggaatcaacctaaatgcccatcaacgacagactggataaagaaaatgtggtacatatacaccaaggaatactatagagccgtaaaaaagagcatgtcctttgcgggaacatggatggagctggaagtcattatgcttagcaaattaatgcaggaacagaaaaccaaataccacatgtgttcacatataagtgggagctaagtgataagaacacatggacacaaagaggggaacaacacaaactggagcctagctgagggtggaggccccagggaggagggagatgagcaaaaaaaaaaaaaaaaaaaaaaaaaaaaaaaaaaaatgactgggttctaggcttagtatctaggggacaaaataatctgtatgacaaacctccatgacacgagtttacctatgtaaaataaaagtttaacaaaaaactaaaaaagttacctatgtaaaacaaaagtttaacaaaaaactaaaaaaagttacctccacccagaaatgcctttattaacactttggtttgtaaccctccattattttctctagacatatagatttatgaggcaggctaatgtgctgagacactagcttgagtttcatttggccttgctgtgaatatacctgggccttcctttgcttcaggatgccctaaactgtggcaaagcagagctgaactgcccaaaggaaagtgtgaagaggagaggcaggccaagcctggagaaaggctacccaagagagaggaaaggaaactgtggtgagtgcacctcactcctaaagaaggacaggaactctggtaggtgaggtgtgttttccatagatactaaaactcaaagccacacaggggacatatgtccattcctcagccagtcactgtggccaggaacagagggtcaggtaagagaatggcaactcctaaggaaaccacatgcctggagccgtgggtgtagaagcagatccccagaggaagcacgggtcccacagacacagtcccaactcttgccgtctaggcagccactcccatctgtaggtactacacagcttcgtagtacttcttaaagtacttcttgttcaagcgatgggacgaaaagaggatgcaggacaaggaggaggaaaggagatccttgcttttgtagaagaaacaaggaggcagggaaggcttagaggacaggcaaggagagatgttttcttaaaaacatcctctgtctgagtgttcagccccacatctctgctggtcctacccctataagcacaaggaaaagggcgggaggcagcaggagaaggattgatcattcaggcctatattcaagtttgccttttcttgccatgtggttttaatctcaccaatcacaagcctgaaggtatagtggggccactgaggtccgagttcaaattcagccatgcaactaaggaaacattgtttgatcttggtcctgttttctcatgtgtaaaatgggtctaactctaaaccacacattgcactgagaatgaaatgaggcactatgaaatgaagtgaggttagttgaataatgttccccccaaattcatgtctactgaggacctcagaatgtgactatatttggaagtagggtctacgcagatgtagtctaaatgaggtcatactgcattagggtgggcactaatcaaacggatggtatcctcataagaggagaggaatgtagagatacacacagaaaagaatgtcatttgaagatggaggcagagattggagtgatacaactataagtcagggaatgccaaggacttgaggtcatgtgttacagaagccctaggaaatgagtcaatttcctggcacagcactaagacatgctggtattcttcattccatccctttcccctattcctaaatgtgctccagggacaatggggaagctggagcacatataagaataggggaaagagagggaataaaagggtattaaaaactctcaaggtatgttaaaaaaaagactctcaacaaaccaggtattgaaggaacatacctcaaaataataagagccatctatgatgaacccacagccaacatcacactgaataggcaaaagctggaaggatgccccttgaaaaccggcacaagacaaggctgccttctctcaccactcctattcaccatactattggaagtcctggccagagcaatcaggcaagagaaagaaagaaaaggcatccaagaaggaagagaggaagtcaaactacccatgtttgcagatgacataattttatatctagaaaatcccacagtctcagcccaaaagctccttaagctgataaacttcagaaagtttcaggatcccacatgaacatacaaaaatcactagtattcctaaacaccaaccatagctaagccaagagccaaatcaggaatgcaatcccattcacagacaaactgctaaaagcaaaaccaaaactttccaaataagccaggctttcgtcagttcctcagaactagttctggtttgactcactctcatgttacggcaaaccttaagctgaatgaacaacttttcttctcttgaatatatcttaacgccaaattttgagtgcttttttgttacccatcctcatatgtcccagctagaaagaatcctgggttggagctactgcatgttgattgttttgtttttccttttggctgttcattttggtggctactataaggaaatctaacacaaacagcaactgttttttgttgtttacttttgcatctttacttgtggagctgtggcaagtcctcatgtgagtaacgagtgggttgagatactctcatactattatgttgtggaccatgatgaggctgccagggtgggggaagggtggcctaccttctctccacaccatttgaggcaagagacattctgcctcagaaattgtgctgaggggcacaaataagctaatgtcctcctgccccagatttctctcacttgttcctatgcatattgttcttgttgctcagttttataaggtgagatattttctgcaccaaatatgtgcactgtaaaataatataactattcttaagattgtctctcagcttagagttttcggaggcttaatggtgaagaacttaaaaatctgttttcctatgactgacatctgtttgtgattatccatttagcagacggtgatccctccaggctggcctttgtttacaagctatgcctaagaggcagctgttggtggagggggaacaaaaacaaaaaacccaaaactattatcttaataacttatagaggtaatcattattgaacaaaagcatgatttggggactatggaaaggcttattctttccatataaaatgatcagcgaaaaggtagaaaaattaaacagaactgaaataattgctattgattgctcaccgcctggatgcactgagtagaagagcaaaggcaatgggttcatgtggaggggatggaggtggagaggctaagcctgagtgagattaccaactaatcaggacttttaacccaaaaatactatggctctgaggggcagggaatgagagacctaaattgacaaaatgcagagtaaaaatattcagtgtgagcagtaatgagacagttgtatcagggtcaaatacggagttggcctggatgtcctccaagctcctttccaagcctaagattctgtgagtggatgaacaatcctggtcctgctgctcttgccactggaacctgatctatttgccttcattatttgaggtctccccatcatcaggctctttgttgtctgctgcttcagggtgtcttctccccagatttctcctgttggtgagcttttccattgaactggagctcctcacaggcaagaagcacacctttaaggttctctgagtcccaagttcctagtgcagtacctggcaatacacataggtgcttagtgggtgcttgccgaattgttgaatggatttatttgatgaaatgtcaggagaatcaccagaaatgaaatgttcgtgtaatggacagggggaagtttgaggttgatttgaaaaaggagatggtagagacagtattatgggtcatgcttcagagtttatttgctttacaatacattggacagcaaccagtagattgttgtgtgtcattttaattccacatgctaatgtccaaatatgtcatatgtcttaattgttgcatacgtgggttactctgtaaaggggcaactgtagtatcacctcctcatgccacaccctgctccactgtagctgggctcgataaccttcaaatcaactcacagaattccaggacagacaagagcatctgaaaggttatctagccccagtcacctctgatgccttccagctgtctctaacacacctgtgggctgacttccagttcttagtcttcacggctccctatgatgaactgcccctgctttgagggattttcctccattgcctcagaagtactgccctgggggagcttctgatgctcttctgaccaccttgtctctgcctttttcactagtcctctgttcctgctctccaaattttgggacgttcctgagttcagatcttttctttataatctttcttttatattctccccatcagatggttcattcattcctcaatattaactaacatttccatattagaaataacttccttatctttagccctaaattttgtcccaaactctggacctacaattttttggaatgcttatgccttgcccagactaaaaccaaacttactgtcttccctctaaaatcagctccccatcttctatttctccctgccacccttcctcccccatggctccaatattgtcttgccagtctggtcttaaaaccacagtcaatcttgttgcttttctctttgtctcttgtgcatggctgatcagcagtcaattgttttgtcaattgtcttatatgtttcttcttcctcttccttgcttcctttttctgacctgaagttagggccttgttaccaaacatctagatgaatacagtgaccccctaattgagaggctgtctaccaattccacccaccctcaattctatactcaaaaaaaaaattagatgtaatctttttcagatactcctttggtattgtcacttagtttttgagtgactgccactatttcccgattggcagctctgcctggcattaagctcttgacattctcaacctaagtgtccagccaagttactctgttcattgtcccctcaacacgcctgtgcatttgcacctctgagactgcttctgagtcagctatgcactgccctttagaatagcttcaaccccaaatcctaccagtgcttcaaaggcccagttcaaatcctacccctctgggaagtctcccttcctttagtcaacttctagggcttttgcaattttatcacttgttttacatcagttttactatttttcatgtgtgagagttttaaccttccaattatggtacaatgtctttaagggcaagggccctttcttagaggaaaccctctatgaattctccaatgataaattattctatgaattctcacaactttctaatataaaggcttataaaaagtgggaactcactgtttattgcttaaaaaattgagatttaatttgaacttaaatgctctattaaattgagtagaatagcatcttaaggctactggtagtctatctatgccacagatggtttagagatcaaataattactcatatacctatgacagcagagtactggctgtaagatccccccaaaactcaaatacctattgggtttgtcaggcaacaaaaataagtgaatccagctaggtctaatacaatggaaaatggtaggacctggggcaaactctgcataacttgcccaaaggcattcaaattcagattatgttcagacattgctaattacaattagtgtcttagacacttggcttcaaaacagtggttagttcaggtatttcagatcaattgggtatgcatttatctaggtcttcatggatagccgggctctactagacactgggagagggaagaggcaaatgggataagactggcagtatttaacaaagaatgaagtattttacaaacatgatcctttaggctggttattgttacacaaaggaatgatttgctaggattcttgagatacttccatagaatgtctatgcctcacttattgcacagaccagagaattccataaaagcactggctgtgtcttatttacccttgtatactagagcttggcacatagtaaataccaagtaaatgttttgaataaaagaaagagataattaaagcttcagcaccacaattatttgtatttcatctatcagtttggaaatagatctccacagacagtagaaatggcaagaaactaggcctatagcaaccaagaagtgaaactgctagaacctaccatcatttctgatcctcttgcaaattttgcttgaaaaaaatttcctcattttctgtttacgaacttatcctcagaatttacagatgtttccttgatttctctggaaagatacaacttcctaatgcaattgagtaaattgatacttcttatgtagaaataagcagaataagctgggcaaggtagcccacaactatagtcccagctacttgggaggctggggcaggaggatcacttgaagccagagtttgcttgaggccaggaattcgaggctgcagtgctctatgatcacacctgtgaatagccactacactccaggctaggcaatgagtgagacctagtctctaaagaaaaaaaaaaaaaaaaaaaaaagacaaaataagatcaaaattgagtatgaactgataaatacaaggtagacaagaaatatcctgagaggcgcaatcgttctgcagacatttgcttgggaagctcaggggaggatttatgaaggaggtagccctgagtgagtcttaaaaaatgggtagacttttaccaggcaagatcttagtgaagttagtgagaggagtggtcatataggaattcatgggatttttagaccaaagattaccaccctcataagtgataatgacgatgaatgtgaagaatgtttaccacttgcaaagtatttttcacataccttgtccaagttcccacaagcatttctgttcactacctgtggtttggtcaagagacccagatattagagaacgtgttgatttctagtttctaactccgcccaataacattaagatgaaaatggatagccacataggaacagacatcaataaacatatttagaaaacacaagtgaattttaaaaggggagacttaagaggtggcatggttgtttgaacatgttcgtttttgtctcctggagaaaagtcagcacaatgctcattcagctacataagtgtttctgttacagctctttcagtccaccattcggcaggtcctgaattcttgtcccttgtccagaaaaaatgaggtatgtggacaactggagggtgagcaaggcggagaggagcttcgttgagtgacagaacagctttcaggagacccaaagtgggtagcacttttccataggcaggaaatgagtgttcaactctcagcagagaggagacccacaatggatagctccttaccacaggcaggtcatcccagagaggtgaggagacacaagccaggcacagtggctcacgcctgtaatcccagcactttgggaggccgaggcgggtggatcacgaggtcagagttcgagaccagcttggccaagatggtgaaactccatctctactaaaaatatgaaaaattagccaggtgcagttgtgcacgcctgttgtcccagttactcaggaggctgaggcaggagaatcacttgaacccgggaggcggaggatgcagtgagccaagatcacaccactgcactccagcctgggtgagagagcaagactccatctcaaaaaaaaaaaaaaaaaaaaaaaaaaagaaaagaaagaaagaaagaggagatctgaagtgagcaactgcttcccctagctggtagtcccaatgtctgttcaagtctggctgagtccagggttttgtgtttgtttgttttgtttttttgagacggagtctcactctgtcaccagggctggagtgcagtggcgcaatctcggctcactgcaacctctgcctcccgggttcaagcgattctcctgcttcagcctcccgagtagctggtattacagacacccaccactacatccagctaattttttgtatttttagtagagacggggtttcgccatgttggccaggctggtctcaaactcctgacctcgtgattttcctgcctcggcctcccaagtgctgggattacaggcatgagccactgagcccggtcgagtccagggtttttacaggctcagaagggaggaagagtgtgctgattggcccatgggcagccatggaagggcccagaaaaagcactgtaagttcttaccccaggctgtggactccacccacaattggcaacctggctcccaggctttgggccatccctggcttgaaggttgggtttcaccagggacctaacccctttccgccaaggaacctgtctccctcttgccatcaacatgctgtccatgatgcccaggctgttcgtgccgaggggtgcctgcaggcctgccctgagccaccctcagcccctgctcagcctccctctgtgcttgtcagcacccaacatctggaagaggtcgaggcagcagggggctagtgtgtcagtaccatcctgagcacccacatgcctggccgggttgtgacagcacctaggcttggccacaactttgcttcacccagtagcaggtgccaggagtgggaagaggccagggagtgggagcaggcactttcaaccttgtgggagcaggggacttcctgggcccctgagagtacagagatgcctgggtccagagccactgctgggcagctacaggggtgcctgggagcatgcggttcccaccccgccaactcagtacggggcgggactcccacctgttcttggcctccctggccacacctccactgctgcagctgctctaaacgggcagctgctgccatcactgtgagctatgattgtgccactgactccagcctgggcaacagaaagagacctatatggtatgttaaatggtaatgactgctttgggggagaaaagatgactaaggattgttgggaatgctggggtagggttggagtgctcttgcaattttacataagacagtctcaggagaaaaaacaatgaaagtgtccgggtagagggacatgtacactggcagcaaggtcttcccttagggattggatctgcggaagaggccacacaggcctggaagcaggcttaaggccattcaggctaggaattccagtgtttcaaagacagactgcaatggatggcggttggtaggtcaaaagctccagataacatctctcagccctgcgaacaccttactctcggggagaaggatgggcacagtgggtcctttaaagcatggggtccaggacaggggcctcttgtcttggctgttgaaaaaactgggttttacactgagtgaaatgctgagccatcggaaggttttaagcaaatatggtttgacttttattttttaaaaaccactctggctgcagaatcaactgcaggaaggcaaaactggaatcatagcatccagttgtcagactaatgcagaaatcaccatgagaaatgacaatgactctgaccgatatggaagcagtggaggtggtgagaaatggtcagattctggatatatttgaaggaagggccaatagggttggttaatgaatcagatgtagagtgagaaaagaaaggactcaagatgactccaaggttcttgtccttcacctcaataagtggaggatggagcagaggaaggcaagactagaaggtaaaaatagcagtgagaaggctctgctatggtataagaagaaatgataagaagctgaattaaggtgatggcagtggggtggaagaaaggagagccaccatgcaaaaagtatccaggagggagaattaacaggactaggggatgggccatatttgcaagatgagaaatgcagaggtctaagattctagcttaaggtgggtgttgctactattagcataataggaaaacaaggcacaaagacttttcaaaatttgtccaaggtgttagaggcttacaatttgtaaaaccaggattaaacccagatgtgtctgattttagagcctgagctcttactcattgcataaaccatattttccccagaggaggattagtaggaaaggaagctgctggttggaaagtatctttatagcagtgtctgttcctcggtttgctcaaggggacagtgtgccaggaaagtccccgtggaagggcaaggaagaaggggaagttaaagccagtggcaggtgatccaagaatcttttctgttgctagagctatgttacatgctgtcctttcatgctctaaaaataagagtgctggcaagtgccaggcctgttggtgcagcttaagatgatacctttcttggatatatatgcatctgaataaggaaggctatcttctggtcaagctaaggtatgccatgagcatttccctgtggaaagcacttaattctgttcccagttgttacctgctgtaagatctccctttctaaaataaaaacaagaatacagctcactgaggaccttacatttccctctagctactgactcatttctcttctcctttttatagcactcttcttgagagagttgcctatatttgttgccacatctttacccattctcttttgaacctattcaagctttcatctgtacaaaactcactgatactgtgcttgtcaggatcatccatgacctccatactgctaaatgcaactctcaagagtatttggctctactgatcactcctttgtagcactgtgttttaaaatataggttttattattatttaggtatggtgaggccaatatatcaggaaatgactgtcgttgaaaaaagtatgttgtactcacagatcccaagagaaggggggcacaccatgccacaaagggccacatggggaagcaccagggtcagccaggaggtgggtggggggtgcgcaagatctttattgtggtttcaacaggaagaaatgggtgaagcagggtgagtggatttaggattagctgatataaataatttcagcaggctctggggcataggggctgtccctagtcttctggtacttggccctggggtgattaaggcagttgcatagtgttgggaatgtgaaagcccccaataaatgaggcagttgtgggtatgggctctgaaatgggttggtttgcatttgaaaggtgtgctcatgggcaagtggtttactctctcttagaggttagaattggctaaccctgggagcggcagtcccttcagggtcagcaaggccccaggtgtcaaagcatcagaatacagaaaataaaatgcatggataatacacactgccatttgcctttgtacccttcctttcaatcttctctgctggtgaccgctcttcacaaagatctataaatgttggaataccccatgtctcagtccttgggcactctctttcctatctctctgtaggtgatgtaatgcagatatccatgactttaaatctttaacacttctgcattgatgactcctaaatttacatctctaccccaactgcctactaaacacctccacttggctatctaataggcatttcaaaccaaatctacaacaaacgtaactctttttccccttccttaatttgcttctcccccagccttctccattttaataaacagcatctccattgccttagtgactcaagccccaaacttaggaattttcccagatttccctctttttctcaaactatatatctagcctgtcagcagttcccttcaggtcttttttcaaactatagaaggcctaaacaaaggaaagacatgctgtattcatgaattggaagactaaatattattcagctggctgtattccccaaattgatctatggattcaatgcaatccctaccaaaattccagcttcctttgtctgcagaaatgagcaagttgaccctaaaattcatttgaaaatgtaaggaagcccgaatagccccctaaaaaaaaatcttgaaaaagactaacaaagttggaggactcacactttccagtttcaaaacttactacaaagctacagtaatcaacgctgtgtggtactgacataggatagacatatagttcaataaaacagaatcgagagtccagaaatacatccttatatatatgatcaattgatgttttgcaagggtgccaagacagttcaatagggaaagaataatttcctcaacaaattgtacaggcacaactgaatgcccacaatcagtagaacaaatttggaactaaagttcttatatttaggttcttgatccattttgtttaatttttgtatatggtatgaggtaaggctccaaatttgttcttttgcatgtggacatccagttgtccctgtacaattgctccatttatatttatcttagcagaaaatacagatgtaaatctttgtgaccttgactaggcaatggtttcttaggtattacacctaaagcacaaacaataaaagaaaaaagtagataaattggatttttttacttaaaatcaatttgtgtttcaaaattaaataaaatcaaaattaaattaaaacatttatccttcacaggattctataaagaaactgaaaagacaatgtgcagaatgggaaaaaatatttccaaatcatatatttgataaatagtttggcaattcctcaaaaagttaaatatagagttaccatttaattcagcaattctactcctacatatgtacccaagataattaaaagtatacatagacaaagacttgtatatgagttttcataggaactttattcataatagccaacaagcagaaacaatccaaatgaccatcaactgatgaatgggtaagcaaaatgtggtatatcatacaatggaatattatttagtcacaaaaaggaacgcagtgctgatatatgctacaatacagatgaaccttgacaacattatgttcggtgaaaaaagccagccacaaaagtccacatattgcttgattccatttttatgaaatatccagaataagcaattgatagagacagaaactagattagtggttgccaagggccatagggaaagggaaggggaaataggaagtttctgctaatgggtaaggggttccttttcagggtaatgaaaatgttctaaaattggataatagtgtttgttgcacaactccgtgaacatactaaaaaccacagagtcgtgcacttaaaaaaagtttgtgttttaaatatatatacacacttagacacatataaccctctttcgtatatcaattatactttaataaagctgttgaaatttttaaaataaaattttaaaacaaagaaaaaatatataaactcgccaacagaccacttctcacccctactagcccctctactctaagctatcagcatttctgcaaacacattcctaaccgatctcactgcttgtaatcttgccagcaacctctccctctcagcaatagtctattgcctacaccaaagcttagttgtctcttaatgatgtaaatgaggttctatcattctcctgacccaaaccctccactgcttttcatcacactcagagcagctctgctgttgcctgatttagatgtatggctccaacagatttcccctgaagaaatgattccatggctgataaaagttggaaagcctcctcagtttcagaccattatcagattagctgtgtgctctgtccctttcctcaaccataagaagtccatggataaagaaagcttcagagtaaaggagaaagcatgggaggtacagcaggaccaaggtggggcattcgcagcccccaccctcatcagagccagttccctactctccctgtctaaacctcttagtaagaggtagttcaagagaggggcaaactcaattccagcactcaaaagcacttgactactttgctcagtcaactagcaagtatttattgagaatgtagctctgttctatggagtcttattttcaagtgtcagactcccagacatccagtccaggtaaagaagatggtgtccattattcatttgacaaacaaagttggggttcaagggccagctattgaaaaaagctatggaaagcttcatgagacgtgcaggtaactgccaatatgtgtggttcacaaggactggttcatattcagaaacggccattagaaaaggaagaagaacttctcatttggatttataaagagtgtcttgtttactcttaatttatatcttctcttctccaggaaatcaacctataacttctcctcccagctccactctaccatggtctgtcaccttccccaaatgatttgttattcccctgttttcaaaagtgaacaaagaaccaaagacccagcaaagtttcacaaggccctgagactttcaattgtctatttcagatcaaatacagaacatgatcttcctcctgctaatgttgagcctggaattgcagcttcaccagatagcaggtaagaaaggacaaagggagaggcttaagaaagaagagcaggtggtggttcctagccaaagccaaaaatgagaatgtggccctcaggctgagggctttctttgagaggacgtatgatttctgggctattccaagcaccacaaaaaaaaaaagagtccccatggtggcttatacatgccaatgtccctatctgacagaaacggtgactgagaatattgctccatctattcccactatccagtgagggtaatgacaagaagacaggatcactcagaccatgtaaatctaaactgatacaagagggcaggggttgagttcccttaaaggtgagatgccaagcagctgtccccttcctttctggcagggagagtaaggagacaatggccagggaacaccgttactctaaagataatgtcttgaagacattctgcatattattagttgtttctgtgagtttcttttttgaaaagcaacaatagcagccgttggtcattcataccttaatgtggtttactgagtcttcctaaaacccaaatgaacaatgaaccttaaggctatccctttggacttgaagaaaggacttctattggaggatgagggtgagcagaaagaaaagcagtttcacagttggttgttctcctggggaaggtagttcagaccattcgagggtgtagttagaaccatgagtgcactattttggatgaacaccaggagctaagagagtaacatagaggtgtggacagaggattaagtcctcaagacaatagccccagccccatgggaaatcatctttctgctcatgattgagaaataatggctcccttggcacttgataacctttcgaagagctttctcctccctactagctggttccagatcactcttcacccagtcacattcctctcactcacttgagctgcccagcctggtctggcactagagacatgcacttggggccctcctcaaaggaagaccctgagatattctgcttacttctactctgctcctgcctgcagggccagctaaaggaacttttcatgttttctttgcaaggaaccctgcctggctggcattttagagacaagcaaaaggggcaataacttccttgctacaaaacagcttcaagtttccatagagtgataagggaaatgagggccaaaagacactgttccccatcctgtggcaggactgggggcttcaggagaaaacttggggaatgtgtaacctctgtgggtttgtagcttaaaaacactgagatcctgggttttctgtctttgttttttgccttttctcttaggaaaggagtgagctagggtgacaaggggcaacattttttatccctcattggctctttctacagaggaaggatcttttcttctaagataatcagcacaagacaatgaagataggcactagctcccagttaggtatactaatggggcaaaaggaagagcatttacatttattgaagattcactaaatgccagatactgtgctaggcaatttacatatggtatagttcatttaatcttcacaatgatcattttgcaggtgagggaactagaactcagaaaaggtacttaatttccccaagattacatagttattaggtgacaccggcaagatttcaacaaagctaatgtcctttctactttactgtgctaccatgatgatggtaatcaaaaatggcagacaacccataaatcttccaactttggaataggtttttgcactgaagtctgaatatggatacgtattgaatgtttattctggatattcacagaatcaaaaaatatgtgtaatgaattatgttgctgaattaactgaaaggaaagtaaaaatgtagcgctttctcattttcttcacgaatttggaattcttttctgctttccactatgcagataacatcagttcagacaaatattaaatacctacctaaattagaatgccttctcctcatgggatttttttaaaatcttgtcatttcatgtctctttaattaaagagttttgatttcagaggagggtacctgcaaaagaaaacaacaaaaaaactaaaggatctgagaaataattagtgtttacttctggggaggggaggaggtctgggatgggggtaaaaaggatagtcttatctattatgtatattcaggtttttgttttttacaagaagcatgtattaggtattatttgtataataaaatataattttaaaaatacaagaaatttctcatataaaaatatgaaagtaatcagactgcaacactcagtgcctgagacagagctacagctatcagggtgtccagacagacagaagattacattttcttccttgctccttgtacagccccagacctgcatgcttcattgaaaagaaaagaagatacctgaattaaatcaatgtgatgcttagtaccctatcagtgcacatttcttttctatttttaaattttaaaaataacacttggccaggcgcagtggctcacgcctataatcccagccctatgggaggccgaggcgggtggatcacctcaggtcaggagttcgagaccagcctggccaacatggtgaaacccctctgtactaaaaatagaaaaatattagccgggcatggtggtggccacctataatccaagctactcagctgaggcagaaaaattgcttgaacccaggaggcagaggttgcagtgagctaagatcatgtcactgtattccagcctgggtgacagagtgagattccatttaaaaaaaaaaaaaaagaaaaaaaaacacttatggcggtattctcagtcattacaaataaataaaaacaatccatatgccctggagaatttgattccaggagtaggtctagaagaacttcaactggagaatggatagagaaatcatggtatatttgcagaatatatattatatatataatagatagcatgtgaataaattaattacaaaaacatatgactacatctattattatatagcatgtagataaattacaaaaacatgtaactacatctatgaatcttagagcataatattgagtaaaaaataaataaataaaaattaaggccagaagataacacatagcacaatgtccttttcataaataaatatattgcttaagcataccttatatatagaagataaagcttaaaaagtaaagaagaggccgggcgtggtggctcacgcctgtaatcccagcactttgggaggccaaggtgggcagatcacgaggtcaggagaccgagaccagcctggcccgcatggtgaaacctcgtctctacaaaaaatacaaaaattagctgggcatggtggcacaagcctgtaatcccagctactcgggagtctgaggcaggagaatcgcttgaaccagggagtcggaggtggcggtgagccaagatcacgccactgcactctagcctgggcgacagagtgagactccgtctcaaaaaaaaaaaaaaaaagtaaggaagagactgataagcccgatattcaggacgccagttacctctggtgcaggcagacatacatcattagtaatgtgctagttcttagggtaggtggtaggttcacagatgttcattttacttaattaaatatattttgaaaatttatttaaagctttctgttgtaaaatatatcacagagaaaaccacatgaaacaactataaagcttaacattactataaggtgattacttttgtaaccaccacccaggttaagaagaactttgtcagctccccagaaatgcttcacataccctagcccaataaaacctcctttgcaaatactcttcatagcactatctgatatgccctttatttttaccttttttaaattaaaacaaaactttttagagacagggtcttcctctgtcatccatgctggagtgcagtggcccaaccacagctcactgcagcctccaactcccaggctcaagtgagtctcctgcctcaatctcctgagtagctaggactacaggcatgtaccacccggtctggctaattttttaaacatttttagtgatggggtcttgctatgttacacaggctggcctcaaacgcctcgtctcaagcaatcctcctgccccagcctcccaaagcactgagatcacaggtgtgagccatcactctcagcctgccctttattttttcatgaaagaaattgctgaagaggactaaaagaagttttagtaagcattcaataaatgtatgttctttatagtttccaaatcagcaaatatagacatcctgcatttttaaggagatttatatattttattggacatgctgtaatttatttaaccacttccctgttggtagacattatttccattttcttctgctagattaatgcttgaaaaaaatgtgtgcctcctaaagactgtgatgaaagttgcctctgaataaaactcaaacaaatcattaatcattaactctttccttacttgtatgctctttggatgctctactgtgttatctataaaataaagtttgaagtgaaaaattagggtaaaacattttatatcatttttaaaggatatatacatggatgtacttacatatgcatgtttaaatttatataccataacatttattctttttttaaaaaagtcttatgaattttaacaaatgcatagtcctataactaccaccaccacagtgaacatccaggacagttccatcccttgccaaacaaacaaacaaacaaaaagcttcacccaagtcttaagtccaggcacttactgatctattttctgtccttatagtaatgacttttccagaatgtcatataaatgggatcattcattagatatccttttgtatctggcttctttcacttaacataaagcatttgaaattcattcatattgttgtgtgaatcaataatttatacctgtttgctgttgagtatattctagtgtatgtatactatattttgtttataaattccccaattggggcacatttgggtatttcccattttgggtgattacaaataaagttattataaatatttgcatataggtttttttgggcaaacctaggttttcatttcacttggataaatacctagaagtgggattgctaggtcacatggtaagtgtatggtttattgtgagaaactgccaaacctttccatagtggctgtaccattttttcattcccaccagcaagtatatgagagttctaattgttcctcatccttcccagcactggtattcttttctattttttctttttttttgagacagagtttcgctctgtcacccaggctaaagtgcaatgccgtgatcttggcttactgcaacctccgcctcccgggttcaggctattctcctgcctcagcctcccaagtagctgggattacaggcacccaccaccatgcccttcttttgttttgtatttttaatagagacggggttttgccatattgaccaggctggtcttgaactcctgacctcaggtgatccacccaccttggcctcccaaaatgctgggattacaggcatgagccaccacgccctgctcttttcttaagtcattctaataggtgtgtagaagtggttctaacttgcattttcctaatgactaatgatattaagtatacatatatttatatattattttataatcttatatataatatacatattttatatattatatatatattttatatatatatacacacacacacacatatttttttctttttttgagacagggtatcactctgttgcccagattggaatacagtggtataatcatagctcactgcagcctcgatctctcaggctcaagcgattctcccacctcagactctgtagtaactgggactacaggccatgccaccatgcctggctaattttttttttttaattttgtagacatggggtctccttgtgtttcccaggccagtctcaaactcctggactcaagccatcttctcgcctcagcctcccaaaatgctgggattacaggcataagccactgcacctggccttagttaagtttttatgtacttattgtatatcttcattggtgacattcaaatcatttcatcctttgtaattgtatactaaggaattaaacgattgtttaattattgtttattttcttattgtaaggttttaaaaattctctatttttttgagacgcagtctccatcagtcgcccaggctggagttcactgtcgtggctcactacagcctctgcctcccaagtttaagcgattctccagcctcagcctcttgactggctggaattacaggcatgtaccaccatgcttggcttatgtttgtattttcagtagagtcggggtttcactatgttggccaggctgtctcaagcttctgacctcaagtggcccacccaccttggcctcccaaagtgctgggattacaggtgtgagccactgccacgaccttaagagttctttattctagatacaagttctttatcagatattgattttcaaatattcttttgaagtctgtagcttgtcttttcattttcttaactgtgtcttttgcagagcaaagattttaattttgatgaagtttgatttatcaatgttttcttttatggatcatgcttttggtatcatatccaaaaactctttacataacccaagatgtaaaagattgtcttctatattttcttctacacattttgtagttgtatattctatatgtaaggtttataatccattttaatttttatataaggtgtgatgtataggttaagctcattttagttttacatgtagatgttcagttgttccagccccatttgttaaaaaacacccatcctttccccattcaatagcctttgaatcttcatcaaaatcaattagtcatatttatgtgggtctatttctggactttttgttccattaacttatgtgtatatccttttgcaaatatcacacttatatttgttttttttcttacatttttatttcaaaatctaaggacatcttataacccagaaatattttttataccttgtcatgtcttagaggaaagagccaccccagtcttttttcattgatgtttttcttctctcttcgtactccagaggtagatgaaaaccagagggccacaatgaccatggtgatgcctgaggtcattctggggcacagacctcagcctaggttactccacttcgcctatctttagatccaaaactaccctgctgactgctgagataaacaaaggagaataatcaggttggggaaaggatttctatgcgaagacatgtctccatgcagtcctcctacactgagcagagcatgagtcaggtgcttagagcaggattttgtcctaaaccaggaacttcagagttttctgaagaatgtggctatgtaaagcacccccccaccccacccttacttctcaagtacattacgtggcaagtctgaaaaaacttacacttctgttgttaaatgtgggggataaaatataaacttagtttcaagaggaagctatcttgggaggtaatgcaaataattcgttgtgtgtttcctgaataagtgacaggtgctgactaccattgatgcttcattgcaataaaatgcaaagctcccccaagaatttttgaaatgcatcaagctaggtgttctaatctagcaaaaggacctgcatacatgaatttttcatgcttttgccaagtcttttgccctttagtttagttaagggccccacatgaatggaaagcctgtgttgtcagcttaattttgtagttgtggaaaccttccagttttctcctttgtctaataccttcaggagttcaatcctaggttgaagcttaatttaataaccatgtggcatgtaaagtagaaaacaaaacatcttttccttagcatacagcaaaaaaaaaaaaaaaactcactcatggatgtagtgtacacatgccagtggatatatagtcataactgcagtcattggtagcacagaaataaatgtgcattgaagacacagagatgaatttgaattccggttccatgagctaccattctttgaccttgggcaagttgcatcacttctttgagcctcagtttccccatctgtaaaatgtggatagcaacatctacctcgcagagttgctgggaggatcagatgaaatgatgggctagcccagtgtctgacttactgtgtttaagaaatatcaactattacgctacttcccagtgacagtccaaatgcagaccagtgttataactctacttctcaaacattaatgtgcatgcaaatcaccgtgaccttcttaaaatgcagatcctgattccctaggtctggggaaggcttgaaattctacatttctacctagcttccaggtgaagttgaggacaacactttgaaggcaaggtggtaaaagacgcttgcacgtgcaaatgttactttgtgtaactaatggttcgcaatactgtctgcactttagaagctcccaggaaaagaaaatctttaatgatgctgacctcatctccaaaataatgtaattttaacagatccaaagtagtgcctgggcattagtgtgttttaaaagcctcccaggtgattccaatgttagccaagattgaggccctctgcttagtgaatctaatttgcagctgggcttgagaaaaaacctcttcatagaattgtttgcatcagtgtcttgattgcctctgtaacttacaataagcaagaatgtttcaggatttcaaaaatctattgcattgcctaaacctcttattttgtatggagtaatcaagctcaaagtttgcatgtcttagaaactttacttggggcaaaattagaccaagtaacaattaatcttctaggtattctgagctattcagacatatgattcatgtttgctaattgctcttttctcttgtaaatattagctgaaaaatgtcacctgtctgacaagtagcatattttatgcctatcactcctggcacgcattcttacaaggcagacaggaaaaataggaagaaaatggacttttatcaaaggcccaggcagtaaagaggggagttctgctgtaagctaaggggagttccagaggaagttataggcgttccctttcttatgacaagaaagcatagtgcagtaaataaatttgctaaatagattcaacagtctctacccaaagtcatctatttaattcttgttgttatgcagactcagcaactaaccttccttgtaagccccattttcttccctgtttcctgtttatcaaatgtaattaaacaagagaagtattatagaagagtaaaagtagtaggtaattcttgaacttggcatatgattactacatatttgatgaatagttgaatattattcttcaaggacagattggatttggtatcaggtggctctgcattaagttataagggacttaataactcaagtatttaaggacggcttccatcataaagggatctgcccttaagagggtcccattatggagattctgaggtgagagctattccaagtgtgcagtggattaaaataaaagaatcatacaggaaatctctttttacatgccttattccagggtctttgcaacctggcacagcaagtgcagatatgattagcattgttttacacatgtacactcaccttatagccctgcccctgtgcccctcctgcacaaaagaatgctgggcacacgtgaactcctctctgtagaaaggcacattaatgttctagccatggttaaaacagggatagaggcaagccaaaaatgtcggtcatttgaaataaatctcaagtttgtgcatatcactatcaagtgtgctgtgtggcaattaagaatgccaatttgtgtgatcacaggcaagttgcagtttgatgaaaggaaagcagaggtgaatatataaccagggtcatcctttctttctccctctctctctttctgtcatttatttgccaagctcttaactagaacttgctatgtgctaggtactggatatatcaaagcaaactcagcctggtctttgccttcaaagatttgcaggatagtgggaagaaaaacttgaatcagaggacatctgcagtgggaatcattcaagcagcagaaaacccaaaagttacttatactgtgaaatctgatcagagaatggactgtcctggttagtaaaatatcctggaggataaagattggccatgcattccacatatgaattaccactttcccaagaattaaaacatggtacgaaagaaaggaacgaacatttgctgagtgcctactgcctgccagatctaggcacttcacatgtaacacctcgtccagcctccaccacaatactgagaggtagagttcaacctcattttatagataaagaggctgaagctcataaagattaaaggacggactcacagtcaaaggactcctaatcctgagtcagcatttgaacccaggctcacctgtcactatatcctatgctcttccgtatcacattttatactgaaacaacttctggaatagctaatgcttagaagcagctcccaaatatttgttgaatgaatgatttgattgaatgaatgaataaatgaatgaagcaagctctactgaacataatttgatctaatcttctgtgattattcagaaactacttcaagattttcctatacctccatcataatgaatacccattcattaatgatggaagcagcctaattttgtcatttttcacactttattgatgtaacactacctttactagtttggccactccttatgctttttttatagaactatttagatcaattcaacttttaaaaaataaagccacatacccctgtggtagatgaaaaacaagtatcatttgcactggtaaatagagaataggaagaaaaataaatgcagtgaaaataaagcagtgttatcaaatcctacccagatactgttatctacccggaagcttcctgtttgattaaaaggaaaaatagccagtgttagaggtgtggaagtctagttgaaattatatgcaattgaaggattaaaatagaattgaaaagggaataaattcctctctgaataatttaactccctttaggctttgattctgcctcatctaaaatcatcttacatacttctagtggcgtgtccctcacattttggtaaactctgagtggaaactacggattttgtagtcaaacatctgactggctctggattttaactttactaacatatgtcctgaagtgaactgcttggagccagtttcctcaactatataaccataatgacaaaacaggtttcacggtcatgttttcagtattaaacaatatagttaaaagtacctagcacagtgcctggcatagaacatactagatatacattaagtatcagttccatttttcctttccctttattgtcagaaaatagaaagcatctacagtgggcttgtatgatgtggtggttagaaatacctgatctgattctggctgtgcaatcttgggcaagttacttaacctttttgtgcctcatttttgttttctgaaaaaaaggatagaatattattacctaccttgctggcttctgggaagaagctcagtgagacgatgtgttagcagagtgtctgacaattgtaagaattcaacaagtaatagttattattaccatcactggtgagaggaagtgatacctggcacaaaaatatatggattaatcaatatggattgagggaaacaaacctggagaataggatgtgaaggtatttaagtaacatgagctcagaccttgatggtagggaagtcgaaaggaagcattttgttcttatatgacagatgacctggaatgactgcagggcttggggggtcagggactggaggtgggagaggcctctgagagcaagcagtgctgtccaccagaagctcttgctggggtgcccagagaggagcaaagggcagtcagctgcacaggagggaatgtttggaggagagagccacctcagatcagcgggtcaagaatcccactcttgcccagatggatggggcaaaggagaaaaaggattcgccacgggaatgtccagataagacaggtgccttttggaaaatgggggtgagatgggtctcaggttacacttcgtaagaactggaatgtaaagtaaaggcagacaatgacaaaatatcttgttttcttttcagctttattcacagtgacagtccctaaggaactgtacataatagagcatggcagcaatgtgaccctggaatgcaactttgacactggaagtcatgtgaaccttggagcaataacagccagtttgcaaaaggtggaaaatgatacatccccacaccgtgaaagagccactttgctggaggagcagctgcccctagggaaggcctcgttccacatacctcaagtccaagtgagggacgaaggacagtaccaatgcataatcatctatggggtcgcctgggactacaagtacctgactctgaaagtcaaaggtgagtggtgtcaaggactagaatccatggaagcatctctccaacagaggatctgcaagtcacagaaacccattaaaggtagctcaagcaaaaacaagcaggctgcttttaaggagacagctatttcagagaaaatgaaagcatctgctcggaaataatttttgacatctgagtacaaagcagccgaagtacaagtgaaagggggtaggacctataggaataaaatgggactggaggaagccaggaaaattagtccctgaaatgtgggagggtatgaaaaataagctttgcctaattcacaattctcccatggaacatccctgacttgattattaagatactctttttcaatagtttataccctgaatccagagtttttaaaaccatggtttgccgcccattcatggattaaaatatcaatttagtgagtagcaaccagatgcacgtttcccgccctttaaaaaataatgtatagaagagaatagacagagtagatcagacgacatcacagagtaggactgagtactgtaaaactaatttctgagggacgtgtgtgtgtgtgtgcgtgttgggtcatggtataaattttttttttcttactttggatcataaaaagttacaagtttggaaaacactgctcaaatgcaagccctatttattgcagatgaagtagctgagatccagagaagggaagtgggtagcccaagagagtcccatgaagtctatagctgtccctattcctctggattcagggatctctccactccagcacaattgaaaatctaaatataaagagaatcttcacactcttgtttgttctagaaaaggtgatttgaggaaagacatataacaactataaaaaatagattttgcttgttcattggcttatggtctccaggcttgaatgctctgagataaatgatgccaatatttctctggcctcttcccctcccacgcattggacctcagatggtctgtactgtcttctagagggtttgtgggttttggccccaaaaaaccattaaccttggcagaaagtgtgtgactttatgatctggtacaaagaaggacaaactagagggactggacatgaggatgaatattgtgttcgcccttatccttgggcaggttattttgcctttcataacctcacattttgcttatttgtagaagacgaacaatagtagtaccaaacacacaggattgttgtcaacattgagagagataatgaacataaagaactgagcatggtacccggcatataataagtgtccagagacttggttaaaagaccctcagttgttacaggggcagtgacctcctcacacctcaaccatcaatgagtcaccaggaaagccattagcctagatgtaactgttttctatctttattgcatttcctacatccaggcagcagctgggaggaactctagaacactgaagtttgtctgagttcccttaatgtaaggctgtacattctcaggatgccttgatgtactcgaatatctgcaaccctaaatcaccacctctgtttttattgatctctatctgaatgctgtattaatgggccaggccttctgcccattctctcaaactgagaactgtctctcattcctggggaggcaccctgcctactccttacctagatcagggatttctcagttgtggagagatttgttccttatagtgttggtcatcaaactgggatatttggggattacaaagacttttcaagggatgtatgggcacaggcagttttaggaagtgagttcctagatcctcatcttccccaaatactcgttcccaaaattgacgagcctgacaatgtgcatgccaggcaaggctcttggggttcccctaaaacacttcctcttttaagcctaccactcactcatcatgaatatagtccattgtcccagggtgtaaaaccctctatagtgttaaataaaagaatgattgggaacattgacacctgatggaactgttatgactaaaaacccttttgcaaataatgtggtatctaattttctgctttcaacaaaattgaaggaggcccttataaagttaataactgataatcaaaaatgagtaatttttgccatgtaaatcaggtcaaagaatgaaatggcattgctgtaacgaaactgcttccattcccattgatttactcatacgaacaagattccttagcctttataagctacaaaaaaatgaaaaatagaaatagaattgaggctgaattctattatataaaatcattccaaccatgtcatatggttcttcggattcatgaataatttggaaaagagagccatatccatcttattaagggacacattcccaataaattttcatctttcatgtttaataattatcaatattcataacattttacattttgatcaaatatgtgttaataataatagaaataaatgtccaacaacgatagactggattaagaaaatgtggcacgtatacaccatagaatactatgcagccataaaaaatgatgagttcatgtccttcgtagggacatggatgaagctggaaaccatcattctcagcaaactatcccaaggacaaaaaaccaaacaccgcatgttctcactcataggtgggaattgaacaatgagaacacatggacacagggaggggaacatcacacactggggactgttgtgtggtcgggggaggggagagggatagcattaggagatatacctaatgtttaatgacaagttaatgggtgcagcacaccaatatggcacatgtatacatatgtaacaaacctgcacgttgtgcacatgtaccctaaaacttactgttaaaaaaaaaaattagatcttaatgcagaacaccctgaacatttaaagcttcatagtcacaagagaaaagttttcatttcaatagctataaatattttgttgttgtaaagacatataacgataatcaatacaaaatctgtcaaacaaaaatatgttacattaagataaaattctgtagggaaggtgaaattggaagtgagtttcaatgaatgaaaagaaacaatttagacagagaagaattttttcatttaataatttatttatttttacttagaaggaattgaatagattaggttccttacccaaaaagcctctgttatttgtcttatttatttattctcttttttccacattctccagtctcattccccttttttaacacaggaaattattccagcatgtttcatacatattcttttgtttgtaagagcttatttaaaatatgtaatattgttttagatgcatatattttttttcttgtggaaactatattgtactatatatatatattttagaaatggacacattaggccgggcgcggtggctcacgaccgtaatcccagcactttgggaggccaaggcgggtggatcatgaggtcaggagatcgagaccatcctggctaacatggtgaaaccctgtctctactaaaaaatacaacaaaaattagccgggcgcggtggcgggcgcctgtagtcccagctactggggaggctgaggcaggagaatggcgttaagccgggaggcggagcttgtagtgagccgagatcgctccactgcactccagcctgggcgacagagcgagactctgtctcaaaaaaagaaaaaaaaaaaaaagaaattgacacattaagtttattgtgaaaacatgattacaagcaataacagatataacagcagaaaaaattgtgaagttatgtgcaccttcttttgagatcatttttttgggtatatgtgaatgtattttatctttttttaattgacaataattgtacttatttatgggatacatagtgatgtttcaatatatacaatgtatagtgatcagatcggggtaattagcatatttatcatctcaaatatttattatttctttgtgttgagaacattcaatgtaccccttctggctatttgaagctatatactgttgttaaatatttatatgtatttttcaaggataatgttgtatataaaagataacttcttttatatttagtcacctttggatacatatgtaagagtaaaataattgttttactaaaaaaattcataagatgctgaacattatatgtttttccagtatagaaacttatgaaaaattataagaatcaacttaataggtgagaagagcatactgcatcatacttattttaggaggaatacaagcaaaaaaaaagttggaccatcacctaagagtaggctaccctgatccagggtctctaaaagaagcaagatagatctgaggccccaatgagggttcccatgaatgaagtaggactagaagaaggacatgtttttatcttaaagtgcctgatccatggcataaagcttgaaaatgggtttgtttatagcaccttcgttgatgtctgggcagaaattcttatcaaatataatgaaaagagttaatttcaaaaggacagaacaaattatgaggtggaatgaccggagattctggaagagacagtgataaaggactgtggtttctgaaaagccaggtggcacctacatttctgggggcaatccatctgaggaaggggcgggagcatggccaaagaacagagaggccccaggagcccaggggtctctcagaggagctggggttgagaactggtctgtgcaaaggtttccagacagggttgcagaggaggcactaaaaacaagaacaccaagagccaaaccatcctgaaggcctgggcagggcagggggatgggaagagccaacaccaggaatgggctgaagctgacagaagtacttcaaaccagaaacaatgaatttaaactatgccctaccacaaatagacttaacagatatttacagaacattctacccaacaatcgcagaatatacattctattcatcagcatatggaacattctccaagatagactatatagtaggccacaaaacaagtctccataaatttaagaaaatcaaaattatatcaagtactctcttagatcacagtggagtaaaactggaaataaactccaaaaggaaccttcaaaaccatgcaattacatggaagttaaataatgagtgatcattgggtgaacaatgaaatcaagatagaaatttaaaaactctttgaactgaacgataatagtgacacaacctatcaaaactctgggatacagcaaaagcagtgctaagagaaacattcatagcattaaatgcctacatcaaaaagtctgaaagagcacaaataggcaatctaaggtcacacctcctggagctggagaaacaagaacaatccaaacccaaacccagcagaagaaaagaaattacaaagatcagggcagaactaaatgaaattgaaacaaaaaaaatacaaaagagaaatgaaacaaaaatctggttatttgaaaagataaataaaattgataaccaagaaaagaagagagaagatccaaataatctcaattagaaatgaaatggagatattactactcatatcacagaaatacaaaagattattcaaggccactatgaacacctttacacgtacaaactagaaaagctagaggagatggatacattcctggaaatatacaacccttcgattaaaccagaaagatataggaactataaacagatcaataacaagcagcaagattgaatggtaacttttaaaattgtcaacaaaaaaaaatccaggaccagacagattcatagctgaattctatcagacattcaaagaagaattggtaccaattctattgacactattccatgggatagagaaagagggaatcctccctaaatcattctatgaagccagtagcaccctaatacaaaaaccagggaaggacataacaaaaaaagaaaactacaggccagtatccctgatgaacatagatgtaaaaatcctcaacaaaatactagctaaccaaatccaacagcatatcaaaaagataatccaccatgatcaagtgggttttacaccagggatgcagggatggtttaacatccacaagttaataaatgtgatacaccacacaaacagaattaaaaacaaaaatcacatgatcatctcaatagattcagaaaaagcatttgacaaaatctaacatcctttatgattaaaaccctcagcaaaattagcacagaaggaacatatcttaaggtaataaaagctaactacgacaaacccacagccaacattatgctgaatggggaaaagttgaaagcattttccctgagaattggaacaagacaagacactttcaccacttttattcagcatagtactggaagtcctggccagagcactcaaagagaaagaaataaagggcatccaaattggtaaagaggaagtcaaactgttgctgtttgctgatgatatgatcatatacctagaaaaccctaaggattcatcttgaaagctcctagaactggtaaacaaattcagcaaagtttcaggatacaaaattaatgtacacaaatcagtagctctgctatacaccaacatcaaccaatagctgcaaaaataaaataaaatacttaggaatatacctaacgaaggacatgaaagacctctacaaggaaaactacaaatcactactgaaagaaatcacagatgacacaaacaaatggaaacacatcccatgttcatgaataggtacaatcaatattgtgaaaatgaccatactttgtagattgcaaaagcaatctacaaagtcaatgcaatccccatcaaaatactaccatcattcttcacaaaagtagaaaaagaaatcctaaaattcatatggaaccaaaaaagagcccacatagccaaagcaaggaagactaagcaaaaagaacaaacctggaggcatcacattgcctaacttcaaaccatactataacaccatagtcaccaaaacagcataatactagtataaaaataggcacatagaccaatggaacaaaacggagaacctaggaataaagccaaatacttatagccaactgatctttgacaaagcaaacaaaaacataaagtggggaaagtacatcctattcaacaaacggtgctgggataattggctagccacatggagaagaataaactggatcctcatatcttaccttataaaaaatcaactcaagatggatcaaagacttaaatctaagacctgaaaccataacgattctagaagataacatcgaaaaagcccttctagacattagcttaggcaaagacttcgtgaccaagaacccaaaagcaaatgcaacaaagacaaaggtaaatagataaatagggacttaattaaactaaaaagcttctgcacagcaaaagaaataatcagcagagttaacagacaacccacagagtgggagaaaatcttcacaatctatacatctgacaaaggactaatatccagaatctacaaggtatgcaaataaatcagcaagaaaaaaacaaacgatcccatcaaaaaatgggctaaggacatgaatagacaattctcacaaggagatacacaaatgaccaacgagcatatggaaaaatgctcaacatcactaattctcagggaaatgcaaatcaaaaccacactgcgataccaccttactcctgcaagaatggccataacaaaaaaataatagatgttggcatggatgtggtgaaaagaaacactcttacactgttggtgggaatgtaaactagtacaaccactatggaaaacagtgtggagattcctttaaaaactaaaagtagatctaccatttgatccagcaatcccactactaggtatttacccaaaggaaaagaagtcattatacaaaaaaaagatacttgcacacgcatttttatagcagcacaatttgcaattgcaaatatatggaaccagcccaaatgcccatcaatcagtgagtggataaagaaaatgtggtatatatattatacatacatatatatatgcatattatatatatacaccatggaatactacttagctatgaaaaggaatgaaatcatagcatttgcagcatcctggatggaattagagactattattctaagtgaagtaactcaggaatgtaaaaccaaacattgtatgctctcactcataagtgcgagctaagctatgaggatggaaaggcataagaatgatacaatggactttcaggacttaggggaaaggatggttgggggtgagagataaaaaactccacatttgggccaggcgtggttgctcacacctgtaatcccagcactttgggaggccgaggtgggcagatcacgaggtcaggagatcaagatcatcctggctaacacggtgaaaccccgtctctactaaaaatacaaaaaattagccgggcgtggtggcaggcacctgcagtcgcagctactcgggaggctgaggcaggagaatggcaggaacctgggaggcggattttgcaatgagcagaggtcgcaccactgcactccagcctgggcgacagagcgagactccgtctcaaaaaaaaaaaaaaaaaaaaaatggccttcaccctaagaaggaagaaaccaagggcagaggaaggaaacaatcaaagagaagcaaggcagcagtgaaaagacaactgtacgtttaagcctctaaggcccaaggaaagcatttgctaaaagagccaagtctcagtgtctttttttcccttggggaaacagaagggtgtaagaaaatcggagtcaagaaaatgtcctgagctccgcctgcagtagcgggaagcctaggagtaaaataacacgttttttaaaaataaagaaagaaattattttaaaaaagaaaacaatgtcctgaatttcaatggggtgggggggaggggaagctcctggggattacaaactcgttaacctgctattccttttcaggcaatttaacagatgaattgaaagcagtcctaaaagatttaactgattactagaaacttgcatagatcctctaagaccaaggcatgtaaaactacatttttccatttatttactgtcattatgactataaaacagatactaccatgtatacatttcatctttatttcagaaattacagcattgcttgtaacatatctgtcagacagccagaacaaaccagggaaacagaaaccatttaaacctgtggaaatctaaagctgaaactagtaattcttttaatgagggagactgagaagccaaacagagaacagggaagcaattcagaaattagcaatagcagaaagctgctcctaccactaggctatagtgaaaagggggaaggcagggttaatggagcccagggattaaagtcacttgacagacactggaacccagtgggcctgtccattggtatctggagccagggaagagatacatcttctgctggagaggccacaaaagtatagagcataggggagaaataccttcccttctccctccagtccaccctctagtgttcctgtcttgcttcctattggctgtcacgttcctaggctatacaggccacaggagtctgccttcctgcaacacagagcagagaagaaaaagtgagagatggatctgaaggcaaacagacccaggacacacaaagcacacacaccttgtgtattgggtggtaaaaggtgggataataatacagttgactagatctataacagactgaaaagctagtagttgttgagtcagggacaacgaaggctggctgatggcctcagtcaacttggagacaatctccaagtgctaaggggtctgttattcaggttgtaaggatatagccaacctaactgagcagcagatcatatatttagcaaaactgatcttatgaccttaggttacattaaaaccctggatatttgtgctgcttagataatatctagaatatagattgtgttacatatcctttttaaagaacgtggcaaaactaaactataaccaaagactactatctggaaatgggtctgaagactgtatcttgtgagatatagttaaaggaggtaggcatgttttacttagggttgaaaagactagatggagtcttcccagttatattcaaatatcagaagggttacctgcaataattgctaacactaattgagtgtttactacgttctagacatctaactaattatttaacacccttgttaaggataagtattgctgtatccatttcctaaacaagaaaactgagggtttaagaggtcatataactagcccttggctaaagcctactcaaactgctcagattctgaactcatgtttttaactacggtgcttaccatatgttgtgttactaaactagacaaataccaatgggtagaagctacaaagaggcacaattttgcttggcatgaagaaaatctttccaatggaagtttaacttgcttattgtataatcatggcaaagactgcttctagaggaagtaggagtttccattcatagatgttttcaggcaaaagttatttagcagtttactaatatcagaagaaaaatattactaaagataacaagggacacttcataatgataaaagagtgagttctaaaggaacacataacaatcctaaatgtgtgtccatttaacagtatagcttcaaaatattaaacaacaattggcagacttaggagaaccagtcaaatccacaattacatttgagatttcaactcatctctattacaactgatagaacaaacaattaagaaaatagaaaatctgaacaacacaattagccatcttgacctaatagacatatgatatatagaacatacacccagcaactacagaacacacattgttttcaagcgtatgtggaacaatcatcaaagcaattatctaggagaattgctgtagaaggtgtttttcattgagcaataagtcagatgacttgaatttttggagtacttccgcctcttaaattctaaaatttactcatcttttcctaagaatatcaccctcagtccagcttccccactgtgggaagcgattccttttccaccaccttccaaataagaaagaggctgtggagacatttctgatactgcaaaaatgtaggatgtgggctcctgtcccttccccaaaccttgctgattcttgtagtggaagagctctctctctgtctccctatctgctccctcatgtatcccaagtcaaagcctcagccaagctcccaattcctggcatccctacttctgaaatcacttctcaaccaggacaccaagatcagtttcttggtccaagccacctgcaatagtgggctggaccctcacccacagtactctgctcctgttcttgttctacttcattccccaaaagacttgagagcttacagaaataatctacagtatgatcatataaaatgattacaaaagacattgaaccaagggaaaataagtgtagataaataatacaaaatgagagataaagtgagtactcgaaatacacacttcgggtactgtttgattatgaaagataggccaaagttttggcttcaaggagattggtgagtctaacaggtcaagtccttcagtaggctgcttcagtgtctgaattgccttatcttctactactgctgggtgctcctaagaacctcagagcatattcctctatctgcttatgttgcaccatccctagacatctgcaattacacagagacacatcctcttatggtgattccaattaagaatgcattacaaaatagtaatatgaattttacccacctcatagggtctgcatatcatttaaatgacataatgtattatatgtattatgtatatttatacattagggggaaagatgtcagagctttttgggacataccaggaggcccagctgggtgtgctgaccacatggagacgagaacttcaagggagagccaaagtgcacgcaggttctggtggatgtttcattgtgcagtgaccctgctctctagtgaacccagatctagtgggtgttgtttgctataatgaatcaaattgtcaactcttaacattgagacccacaacacaggaggggaacagaggggcaaaaattgtgaagaacggcatgaacattccttctcttccataggatgtaaaaggacgtggcacaaagctcaacacatagaaaacaataagtaaatcatacacatcagatggttttcacatggttgttaccattattttaatgtgaaattgtttttcacaaagtttgtacctatttatacttccaacaatttaggagaaaaaagttgtatcacacctctgcctttacttcaagactacacttacttcaaaaattgtattgaaatttaatttcttaaaagaatatttcctaccgaatggaagccagtgctcatcccctcttcctctcaccaaatatcaacaggtgactttccacactgcctggtaactgcatatggtattgatatttgtttatttttagctattatctaagaccactggaaggtttgttcttgtgtcttctagtctcttggaatatcatgcctattttacttatttttaaagtttttataaggttgtaatgttttattttaattttaaaatttatttttaactggcaataatgtatatttatggggtacaatatgatgttttgatctatgtatagattatagaaagagtcaatcaagccgggcacagtggctcatgcctgtaatcccagcactttgggaggccaaggcaggtggatcacctgaggtcaggagttcaaaaccaggctgaccaacatggtgaaaccccatctctactgaaaatagaaaaaattagccaggcatggtggcaggtgcctgcaatcccagctactcaggaagctgaggcaggagaattgcttgaacctgggaggtggaggttgcagtgagccgagatcacgctgttgcactccagcctgggtgacgagcgaaactctgtctcaaaaaaaaaaaaaaaaaaaaagaataaatcaaactagttaacatatcacatcaccaagttgtttttttgtggtctttatttttttctcttcttaatctcaaaacagagaatgtaaaaaattcatgcttttagcaaatttgaatacagaatgcattaactgtggtcatcacacatggcaatagatcactaaaacatttcctctactctgagactgagcaacatcttccacatccccagcctctgataaccacctttctactctgtttctatgggatctacttttttagatttcacaaataaatgagatcatacattatctgtctttttgtgcctggcttacttaacttagcataatacccttcagttccatccatgttgtcatgaatgacagattttacttctttctaagggctgtaagtattccattgtgtatatataccacattttctttattcattctctgttgatggacatttagtttggttccacatcttggttattgtgaatcatgctgaaatgaataaaggaatacagatatctcttcaacatactaaattcaattcctttggatatatacccagaagtaggactgctggatcatgtggtcattctatttttagttttttgaggacctctatactattttccaaaatgactatacttagatctcagctttcttgaggcagggagccatatctgtttaattcactcagcatatactgcaaagaagcaggtgtgtgtatgaactgtgtgtgtttgtgtgtatgtatctgcatgtgttagggagaagtgcagaataaatatacccaactctttactatgtatagacattatctaggtctttattttttttctcttcttaatctcaaagaaaacagaggaaaggaggaagtaaaaagtaaatttttgcctgaagatgtttggaaaaaataccaaataaagtgagatagtgggtaatctagtgatttttatttttccgtcctctttctggcctccaattgtgaaataatttatagcactgtaagaaagaagccacaaattgtggtagcttggaccactgttgaggtctggaatcagaattccaatgttcaaatattggtcctaccagttataagctctatgactatgaacaaaacactcaacttctctatcttcagtaaccgtccacaagaattgggaatatcaacaatgccatctttattgcattgtaagaattaaataattcaatatatgtggaaaatagcatgatatcagggatatacaatgtgtttacaaatgataaccattattacttaatattgatagtgataattttattcatttcacatggcatgaagtaccaagctctataggaatcagaaaataaagtcttatttctttttcttctctattgtccagcttcctacaggaaaataaacactcacatcctaaaggttccagaaacagatgaggtagagctcacctgccaggctacaggttatcctctggcagaagtatcctggccaaacgtcagcgttcctgccaacaccagccactccaggacccctgaaggcctctaccaggtcaccagtgttctgcgcctaaagccaccccctggcagaaacttcagctgtgtgttctggaatactcacgtgagggaacttactttggccagcattgaccttcaaagtaagagctgcccccacttcctaggtctatcagttagggttcagacaagaaacagatggcatactcgagtgatttgaggagagtgtaataaagggactgtttacaaaggtgtgatcaccatttggagaaactacaaaggatagtgcagaacactggggcttcaatgttgggagggcaattaccactgttggagaagttactggaatcagaagggagctgtagggaaagccccacttcccaggagctgtagccacagaatagggaagctgccacatgcagcgactccaaagggtggaaactggatgaatgaataccccaactcattctcctcccaccctccaatctcctgctagcacctcccattggctgaacccagctagaagtcagagaatacaagggtccactgttgtattccataaaagtcaacttctcagggctcagagcaatattgacatgtacagaatagatctggagaggaaacagaaaatatctagtacaatagctaatcactgtgattcatgcacagtgtcatgagccagcaggatgaatattcctttgctgtacttgctgccagtcagctggttatgggtttttccaagaaatttggtctctaacaaaattcttcagagcctttactgactatgctggatatttttggaagggatcccatacttttgaacttcatacagcagaatttcaaacaatcttgggaaaataacaacttttatctgcccagtaaggacaactaacacctagtatcataatcatttcgtaagagacaggtaatttcatcaccgagtgcatatgttttctaatgctcttatatcaaattaccacaagcttcacagtttaagacaacacagatttattatctgatacttatggaggtcagaaagccagacttgagtttcactgggctcaaatcaaggtgtcagcaggattgcagaggccctaagggaagattccactttcctgtcttttccagctgctagaggccacctgcattaattgcctcatggcccctccctctatcttcagaggcagcaaccctatcattcagccttctgcttctgtcaccacatctctctctctctcttttttttttttgagatgaagtcttattctgccccccaggctggaatgcagtggcacgatcccggctcactgcaacccctgcctcccgggttcaagctattctcctgtctcagcctcctgagtagctgggattacaggcacatgccaacatgcctggctaatttttgtatttttagtagagatgggtttcaccatgttggccaggctggtctcaaactcctgacctcaggtgatccgcccgcctcagcctcccaaattgctaggattacaggcgtgagccatcatgatcagccacatctctttccctaactagcttgcttctctttgccacctcttaaggacccttgtgattgcattaggtactccatccccctggttatttggggtgatcttcccatctcaaggtccatcttcaaaattccttttgccatgtaaggtgacatattcacatgttccagggattagaatatggacatctttggggagagccataattttatttatcctactgagaagggatatactctcagactaaaggacagtccctagtactgattcaatctggctttatagaaaattcactatattgtcattgtatttcacagtttgccctttgtcttagctggtaagacagagcctatgataaggacttgtgtggcatgcaggtatttaattggcaaccccagagggcagaagcaagagatttaggagtttaagagagggtaatataagagtatattatcaaagttgtagtgtggacaacagaaactcaaatattcaaggaccagcatgtagacagcctcctaagatgtctactcagacaaagaatttcaggtggaaggacttgttcatctgcttcacgcccattggttgacaggaatatgaactccattctgctgctgggctagacatgcatgtgggctgagtgagctttccccagtatccgtagcatcagaaaagtcgcagggcagaaagaaaagtatccaatttgaggtgaattactgaccttgaagtgagtgtaagcctaactagaattctaccccagctggctgaagtgaaaggtgaggctgagaggaaataaggcaggactgcacagtccccaattgtactgttcaaatccactcatgcccttcattaagtcagctctgccactgagccttccagctgggaggcagccacaatctctgcagaagatttaatatacaccagtttgtggaacaagctgtagttcctgctgctgctgtggatcccaagccacagttgatatttgttgtctcactcatccaccatacattccagatttccctcacctaacaccccagatggaatggtttctttgcctgatagggtgacccagacttaacgaccctaagagatctgagcttttgatcagcatgcccttaacagactggggttgttgcaaatatcttttcattatcactggatatggaagtaaaaagaaccagtgaatcagcggacccctgagttccagacatactcttccttgtctccattatgtagcagtgttcaagattttcatgataatcaagattgatttctccaccagtatggtaatttttttctttgctcactggtctgccaatattaagagctcaaggtggccaggccagtagcagagctttagatgcagtagaacaagcagagtatcccctgctagaattccccgtaggaagccagacctttgattcagcagagcctaaatgtgtggggttgagtgaacttctatacgtgagtcattagaagtaatggtgagaggggccaacctgcagcactgggatagccctggtacagacgtagaacatgcttgaggaggttgtcaggaggaaatgagttagaccttgcacagaactaccaccatcaagtacagttggggtgaggcagacatggtatgagttgaggcatcagagatatctgatgctttatgccaaattaaaattaattttttcatggagtgacactgatccacagaccagactccaagaactttgcagtgactaaatacccatctcatcataactttcctggtattttcttctggaaaaaattcttccctgatacagttttcagaggcagctagatgcactgtcatctctccccttttcccacttccctacctatccacaatttactacccaatgccaacactaaagttagcccaacttccttctaactaaattattagtttagaaggaaagagaggagtcatgctaaggatcttaactgaaatcaaaacattagaggctgggcatggtggttcttgtctgtaatcccagcactttgggaggccaaggcaggaggatcacttgagcccagtagattgaggttacagtgagctacaattgtgccattgtactccactccagcctgggcaaccgagtgagactctgtctccaaaaaagaaaaggaaaggggagaggaggggagaggaggtagggaggggaaagaaagaaactagaaatccatcaattttaggaccaacttcaggtaaaaaaatgaattaggcaagttggtctttcaacattctctacctctctttatatcatggttgagaccacagacttctcacctcatgaaagatgaactctaactaattcatactaaagctaaagcctctaaagaggattaaatatgagcaatcccacgagaacttttttcccctggaattgtttattcaactgtcgttcgttatatggaatttcctgcctggttaagtgtaggccagtactttggatgaattgtagttttctagaaagacgcttcttatataagaacctctccagggaaacaggggcctgtatgagatgaattgagaaataactttacaccactgattatgtcagtgttctattctgcatggtagagatgtgaaagggcagactgaccattgctctggaagcctttacgctgtgagaagttaacagtggagtaaaatggccactccactctcttcatggaagccaacatggcttactaaatagtcaacaaccatgggagagacctgtggggtcttcatcagagctcaggatctcctagggtatcactcataaatacagccatcagggagatggagaaatctttgtgcagccagaaattctcaacctggttttacccatccttcccaactttgtattcgtcctactgtttactgacatggatcctctgcttcattaaccatcccttcctcaccacatgctctctgaacttggctgcaccttttctacctccatgccttctttgctcaggtttttccacataaatatcattatttccctctctactagctccaagcccaccctctctctggggcagctcagtcactccagggcacaagggggtctttccctcatcccacattttgagacctactacctggaccatttgtttgccttgtaactatgcttgcctttttaattgctattttattttccatgtattttcattgttcacacaagtcttctttattccacactaaggcaaaagcagagtcctgtgttcataataagtgctcaacaaatgttgggttgattgggttggagattccatcttagataatcgcagtcccatcatgccagctaccagactgtgtggacagccaggtcagagcagccaaatgatattctagcttgtggcacaaataccagcaacaaaataaccaaagtcacacatctgcctctgagttcctggcttctatttctcaagggcatttttaagttgtcttatgactgttccctttctactcattctcataaattgagctgtggactgctgtgacccacaagcttctccggaagtcaatgtataaaacaaacacggaaacgaagagtatggtgggtggagggtactccactgactctagaatggatgactgaacattccaaatttcaagcacaagttagggagcaacagatcattttccttttgaaatagggtttcttctgctcagccagttgttgtattttcattaggaaatggaatgggactacagcacaaaaaataaatataaaaggacccttgtagggctggcagaaaagagaatccttcctaggagacctggaggtgattccaggcagtggttgagagcatgggctctgatgtcagacaggcttaaatttcaaactctctctctattagctttgagaacctaaatatcctacttagccactctagcactcagtctctcatgtgtagcatgagggtgagtagtggtagacagtttatagggttatagtgaggattaaatgaaatgtgcttataaagtgcttagtactcagaaagtgtgcaaacagtaaaaaaaaatggtatatctagcaagttgcatgccttacttgtgagttcatgaagttgtggcaaggataagacaaatattttttgccattgcatcattatatcattgctaagagtatgccattattggccaggtgcggtggctcatgcctgtaatcctagcactttgggaggctgagatgggtggattgcttgaggccaggagttcaaaaatcagcctggctaacatggtgaaaccccgtctctactaaaaatacaaaaaattagccaggcatggtggcaggtgcctgtaatcccagctactcaagaggccgaggcaggagaatcacttgaacccaggaggcggaggttgcagtgagccaagatcatgccactgcactccagcctgggcaacaagagggaaactccttctcaaataaataaattaattaattaaattaaagaaacgacaaaagagtatgcaagaattttaaaacaacttagaggaatatgtatgaggatacaggctaagctaccataatgaagagacctcgaaatacagtgagaagcgagacagaagtatctttcgttccatgtaacactcaggtggttcagagcagctaagcagctatgttccatagagtcattcagtgatccagattattttcatctgttgctctgccattctccaggatgttgtccctataaaattgtcaaagctcagtcagtgccaaacccatgtttcaaccttcagaaagtaaacgagtggtggaaaacacattcaatgttttaaggccaagaccttgaaaactcactctcttagcctgaacttagattacatggctgggcccacttaactataggggaggcttggaaacatagtctctgagaagccatgtgtccagctaattccctaatactaaagttgaaagaaagaatggattaaccagcagtataccacaaggtaacaaatgactaggaggatcaggctaggtggactagaaaagagacagtcaattcagtgcaacaattccatattgacacttttcatgtagctgttgcttggctctatctagagaggactcagaggtagtttagataaggcctttgccctccaaatacagtctaagcagactgatttcctactggatgttcaactttggagtcttcagggatgagtagggcttctgtacgtggaagagactatgagggaacctgcacaggacaagggtttgcataaagacactgaggtagggacctctcctgttgtggggacagtgagaggcccaggtctccttgactcacaaagtgcttactaagcacttactagaaattaagaagcagattataatcaatatgggttatccaatgtttggatgagcaaggctccttatcttttcttcgttaatgttaatcacactcttttggatggagacaaatatctgtgggggctgagctttgggtcagatagatctgggtttgcaatcctggcattgacttttacttagcagtgatgacctcacatagattatttagcaactctgagacttacttcctcaactctaaaatgaggggctcagactaaataatgtctaatctcttctccagtaaaacaatccgtggttctcagatagcactgtgctggaggtagtggggtttgagggctgggaagttgggaggactgagcccttcccgctgagcagtttcgtccagtttttcctgtaccagcctgtcatgtttattccatgtgaatgactccagaggcaaaattcaagcttttgaatagggcacaaattaacttgagtaccctttcatttccctgtaggtgaacactcctctagccctgccttttgtcagtctggagcccttgttctaatctgtacacaccagaggactttacaaggctttccccagcctccagaattattcttctgatccaccctctactaaactcaccctttcctcagtgctaggacgttgaaaaaccgaaacaaggcaaagggccaattgtaataattcacactaaggcatgagtgactaggtttagtatattaacactacctaggatattctatttcttccaaaaggatcctgttaatccttgaaatttaacaactaatggtatagattctaagcactgtgagtacttgtcagtgggggaaagacatttttgggctgagagactttgccactgggaagagagagaggatgaggaggagaagggggatagggaggaaaaagagaaaaaagaaagaaagatgattagatgatagatggatggattgatggatggatggaaaaaaataacatgagagagtggtaaaaagcacagaatctggaaccagactgtatcttagctgggtcacttactatgtaacttagggaaagcttcctagtctctctgtgcctccctttcttcaccagtgaaatggggatcatagcagagccaacttcacagagtggttgcgaggagtggatgagctgataggtgcagagcacttagaatagggcctggtgtggagtaaatgctccacagagctagccgtgttggctgtcacccactcatgtggccagcctgttggtctacctcttagttgccatgtaacaggattctggtgcttttcctttgcccaggtcagatggaacccaggacccatccaacttggctgcttcacattttcatcccctcctgcatcattgctttcattttcatagccacagtgatagccctaagaaaacaactctgtcaaaagctgtattcttcaaaaggtaagtgagttttattcatggtaacccaatgcactgggtgtctgcagcatgagccactgctttgcactgcaggcctatggcttgctgctttcatgctaaacccactcagagcttatgaaccactttgagcttgtcttgatgattatttttccccagaagaaaatggctctcatcgtcagtgagctgaacttcttacactgagttttttaaagggaatgttttgttcttatgtctgaaagagtttgtcttattctttgagccaagagctttcatcagcctcatgagagtgatgttattttggcaatgcagagagctacgtgctccgattttgctggtgggaggttgccaggatcctttctgaggattccttccattttcacccctcttttccccagtctggatatgacctgggttaaacccaccccctctcccaggaatctcaacctcacggttgggtaaggaaaggagaaaggtttgtgaggccatttggggataaggaaacagctggttggtggtgcattaacgtctttcagcagctcccttcgagtttctccttagcctgttgtattcttaccaacacactcctgttctgttgtaccagctgggacagagcatgctgaagcctttcagccctgatttcattgcttcattgttcatgtgtctgtctttggtttcctgggtggagcctgcccacaaaacccccagaatgtatgcaggcctagctggtgctttcctaaacggctcccttgtctgcactcaatgaacttctccaaagatctatacatggcctcatctatagaaagagaaatgacatgtggaaataattcagtaggagtttgcagcagcactatctgaggactaggggaattttaagtggttgttatcttacatttatactcataacttctatattttcatctgccataaaatattgtcatgttctatttgtccattgccctatgtgtgtatgtattcacttgggtgctgaccacaatatttctaactgtagaatgcaaggaattgttgccaaaagaaaaagacagagggagggaagaagatggccaggggagtgagggagaaagagaaaacaggagatggagaagaagaaagatagaaagaaaaataaatgtgggagggaagggagcttcatggtaaaggaggaggtatgtccaacagaacttcgacttttaaatagaaccacttcagagagttgtgtcaggtgcacctcagttgtcttatcttctgccattcttcttttacctctcacacccatacctcagggttcaaggcctggggcctgaggactccttaataacttcagaaatgagcagctgagtgttccgttccagctgtctttgggagaatggaatggagtcacactcaaagatagagtggaaataaatcctctcctcatccttcaccccaatcttaagagtgagtgaggatatcagtagctccgagctgggaggtaaagctcaagttctaactgtgattaggagacctttcttacaaataagaattaagtgaataaatgtgcaaacaatttcttttatatttttaatgaaccagagagaaatcatggttgcctatataacccttgtctccaactcacttgcattcagatctgctttcttacatgtgtctgccatgcacacaaacttgtgtgccatggaaaagggttgagaactgctggtgatgcagacagagctttaaaccagggtcagagggctaggctgggaccttgtgctgccatttgttggctttctgaccttgtacaaattgcctatcttctttgagatggtctttctatctgtaaaaggggaagcagcaagagaaggaacattttacagcttattggccgaacttcactgccgctagtgtggttcaacttggactacagagaaatcttcctaactggtttccctgtattcactcctgctacctccaacttggtctgttctcactttttgctataataggcttttaaaaatcataaatctaccatgtgtcctctgtccagaccttctccatggcttcttattgctcactggatgaagttccaacgagcccaggatggtttgactcatgtctccagctttaactgcatcaccatcaccttcattgtctaaagctctaaccacacaggattttctagtcctcagaggcatggcagtctttcaattccgagttttctcatacaatattgtctcttcttaaaatattttttcttgttgtccacctgagttggagtcatcttttaaatctcagctaagcttatacttcatcaagtctttcctaattctacctccacgcaccacacccattacattaaatccccttattatatgtttccatagcacctacttcttctttcagtatactcagcacacaatcacatgtctaggatctgttttaatagcttggactaccaattaaattgcatcccttttaattttccaattgattcctcaagtacccacatgcccatcttagcaagaagttcagtgtctccctcttatagcatgtacttctccacctcccacaaactgccagaaagcttacttagcccacagggccagtgctaggcagctaggttagtcctccagagggccctggttttgagcagttgctgtctactccggccatgcagaatctctggtccttccagatgtctccatccactgtgcaaaggtaaccttgctggttccgatccccacacagaccacagtgctacaagattacagttcttatggttccccaacacatgctctgtcattggtcccaaagcaggacccctatgggttgatgaggtaggaggaggtccctgccttagccacagctgcacacagccagcctcttcccttctaggccctcatgttgagcctgggacgccagtcctaacttccttctcttcagttcctcttagggccattggtatcctgaatttcttagtccattgcaaagttaagtaaagaagcagcaggcttggtccctttccttccagatggcttcttagctcctgaacagatttacccacctatacctcagtgactagctctgtgtactaaagtgtattgggagggcagccattattggtccataaaaggtcctgcttaccattttcccctaagaggaaccattcaacagtttggggctcgagggtgacctgctgggctctagagaagaagctggcaacttctgttgcaaaataatgttaaattctgcttcatctgcttgtctttacgtttcaagaatacagtaactgtgtttctctgattcaccaatatatgcccagtgtctaaaaaattacctggcatataataaatgttcaatgaaattttaaacattgaacctactatatgcaggtgagtatgctagatctgctctgtccaatataatagccatctgtggctctttttaagttaaataaaaattcatcagtcacatcttaagtattcacacactgtaagtgctcaatagccatgtacagataattgctcctgtattggacagtacagatatacaacatttccatcattgcagaaagttctactgaaaaccactgtgctagaccctttacaaacttctcatttaatttcacaaaaattgcttgtggcaaggagaagtgtctttatgctggagttaagaaagtgaggctcagaaaagttatatgacttcccaaagtcatacagctgggatttgaatacaggtctgtttgactccaaaacttgtggcctatttgttgcaaaagtgcttaatacaaattggttcagtcaatattattatctttgaacaatggaaggagaaagtaagtttcaatccaaaataattgagtgacttatacattgacttgctgagccaatggcaaagtcaagttagaatccagcagaagtcaccagctacagaatctagatctttagaacatgtcttcagatcttcagaacagtgtttcttaaactctcttgtgaaggaacagttatcatcataggctggtaacagttcacctaccagcaccagcccatgaaccagactctaagtggcacagccctagaagattgagccagaattttacagaggtttaaagaccaaatatgctggtttatggttacctgtggcccacagagaatggcagcactaacctcaggcataaatgaggtacccactgaagccaacattcaagagcaattcctatgggttaaccattgggctcctttcaaatgcaaaccctcatgaaagagactacagtgctgaatagagacctccaaattccaggccaagctcaggatagtcatgagggaattactaaaaacctggtatatagggcaaaagcagaattaggaatggactgatttcaggaacccaggcaatggcaggagttgggcattaaatcctaaaagagaatcagagtgggagggaatatgtgaaatcagaggttaagaaaaaagtgaaaacctattcatgattgcaaagatatgaaaccaacctaagatcccattgacgaataagtggataaagaaaatgtggtatatatacaccatggaatactactcagccatgaaaaagaatgagataatgtgttttgcaacaacttggatggaactggaggtcattattccaagtgaagtaactcaggaatggaaaaccaaataccatatattctcacttgtaagtgggagctaagctatggatatgcaaaggcatacagagtggtataatgggcatgggagactcagaaggagagagtagggagtggcagtgaggaataaaaaagctgcatattgagttcaatgtacactatttgggtgacgggtgcactaaaattcagacttcaccagtatacaattcatccatgtaaccaaaaaccacctgtacccctaaacctattgatataaaaaaaaattaaaagaaagatgtgaaatcaaggaaacttactggtgagcagcatcccattatgtgaacttgtgcttctgaaccagtaacttgagttactttgagccagtatcagtcacttataccttagtgcaaaattaattgatcagacattctgacctggaccagggaaggcaggcagaagtagcagtcaagactaaagcagaaaagggagagctaattctgcagccagacatttcctggattgaatacccaaattagtccctcagcctttaagtgcctgagggccaggagtagacagaggaatggaaagtgtgagacttctttgttcacactctttgcctaggggccagattttgctttatgcattaccatccgaagtcccaggccacagtgaacatttgggcttcgctatgtggatttatttagatttactttttgtcctgccatattttaatctataagccaaacagttttctcattaatcttattccatttctggaatttttccttttcagacacaacaaaaagacctgtcaccacaacaaagagggaagtgaacagtgctgtgagtaagcatgatttttacttttctttcttactttcttttctctctcagcttgaattttaaagtaaccactgttctattaattcatggaaggcaactgaatagttccagcttatagaatcttcctgtttggtagcatttcagcgaagcctcgttcttagccccagaacaatcatgccatcttttgctcggtctatattcctaagcactcctagatgatactgcactggacctctggtctcacatagttagaaacagagttaaaatcgaacagcaaagagaagatattcaactgcgatgcaattgacaatggatgtttttgcaacaaacaatgattaagaagtacattgttgtgggctctgagtcaagagtaatatgggaaaaacacaagtctcttcatgaggttgacaggtttggagctggaatctgtggaggaggaaggatatgatctaggggtcagaagaagtgggttactaaaatcattaagcctggttggatgaaaagcttagactcaggggaagcagcacatgattgtgggggctggcaagtttgaaatgtgtagggcaggccagcagtctggaaacccaggcaggatttctaccttacagtcttgaggcagaattccatcttttctgggaaacctcagttttttgctcttaaggccctcaactgattgaatgaagccaacctacatcatgggagataatcagctttacttcaagttaactgatagcaaatgataattacatctacaaaatactttcacagcaacatatagactagcatttgactaagcaactgagcaccatagccaagatgacacataaaattaatcatcacaggcaccaagagatgaggggggcagtcttggccatatatttggctgaagtaagtcaatttgtcattcctgcatgagcctttataaacagaagtaagtaaccaactactatttggtcattggagttgtccaagaggccagggttctgtctaatacctgttcatgcatgaacatgccaacctagattgcatgcagactaccagttttgggtttttgtttagttcagcaggatttttctcagctcactgcctctcaaactttcagcaacaaaaggacatctgtgatatcagaatctaccactctaagtatttggatgcaatagcaatgaatatctgagtaaatctaggtggggagtgggggcaccctgtagccaaaatgatttaacaaaatcaaaccaaaattttggaaatgatgccttggtacaatgaagagactacttgaggtaggtttgacttatctaatatcttattttctttaccaatacctaatgaggaatttaaatatttctagatagctttggaaaggtcccttaaagaggcaccagcataccactgccagatctaatccccccaaacactgttttcatcatcatcatgtcatctcttgtctctatagatcatatcaaatccttcccagagtttttcaggccttttgacaactagccacatttcactaagccaactcatctaccactcttcaacaaaacttttcctcaagttgagctgctccaccaacaccactgccatgagctcattcccacttctgtggctttgctcatgttggttatttttttggagtgtcctccctattccttcttacttgtcccaatcccaacttttggcatggtctactttaagatacagtaatgagtaactttattattataacaccaggcttctgttctaagacattagaagtgtgtttagactagctcatttaatcctcacagtagccctctgaagtacttactccctgcttcccattttataggtgaggaagaaaaacatgaagaggttaactaacttgcccaaggtatatagctaataatataagggccaataaattgattcagcaatccaggtgtccaagtccagaatccacacccatacactacactctgcttttttaaaatttaattcaatttttttttagagacagagtcttgctctatcacccaggttggagtgcagtggtatgaccgtggctcactgcagcctcaacttttggactcaagctatcttcccacctcagcctcctgagtagctgggactacaggtgcatgccaccgtacctggattttttatttttattttttgtagaactggggtctcactatgttgcccaggatggtctcaaactcctcggctcaagcaatcctcctgccttggcctcccaaagtgctgggattccaggcgtaagccactgtgcccagcctacatacacaacactctcttgcttaatctgtaagactctctcccccactcatacctttttatttttcctctgcattgtacacacaatctataccactcttaagcacatgattacagcgttattttctggctgcttctatgtgtctatattttaggtccacctggtcaatataataaagtgggatattagtgttaatgcaactatatggtatttgatatttgtctttctgtccgtttatcaatgtttcttatagtttattatataataaatttaaaaggtgtctgattttgaccaaatttgactaaatactaaaaaacaatattaaaataaattttgtttaattttagttgagtctatcaactcaaaaaagaataacctacaacaataacaagtttcagaacattttttaaattactgattttatgagtataaaaataaaaaataaaaaagtataaagaaaacaaaaataatttagaatccattgcctagaaattgccatggttaagattttaatattgctcaggcccagacagctcagggctttgacattcccacacccattctctgccatcccagttctatctcatcccaaaaccatccattatgaggagagtgtacagctctaggctgcccgggagccatcccgcactctcattttgtgactcggcatcttgggagatggagtcttgggacttagcctggacatgtcccttgcatgtacttcttacaagacttttattcagatgaatattttcccttccaacttaagaagcacagggcttgctggttttgcttcactaaccagcaactgaagcaagacctgacttgtgaaaatgcctaatagagttcagtattagcgctgtttcaccatttcctggatctcttgcctttgtgcacatgatagaattgcacttctctgtgattaatttgtagttaagtgtggtcatgtaactcgctttggtcaattaaatgtaagcataagtgatgcgtgttatttctgggtagaagatgtaagagttggcatatgctttgccatattttctttatccatctggcatggtaaccagtaacattctaggtagtaattgctccatcagtctcagtctctgagtgactaaaattgacagagtcccctgctgaccctcaatgtacatggaacatgaacaagaataagcttttgttttttatattgagattttggagttgtttgttcctacagcattacctagtttactctaatacaacatggaaaaaactggaacctataataaatagaccctacgttgccatttaaacttctagttctgaggaataataatgtggggaaatactttctatataataaaaaaatagaaaattgcaaaataaaaatatacttatgtatcattcatgtcctattaaaaatgttatttatagactcaccatattcccttcctccagaaaaatagaagtaaaaatatgaaaatgcctgtaatcatgtttttggattatggaatcaagtattgctttttacttttatgttttctgaatttttgttgtacttcactacatttttgagtgccctgatgtattactttcaaaaagaagaagaatactttctgaagccatttcaaccatccccactcacctctctagatcccagtaaccaaatacattatataggactcttcatcagtccttatcaagtttaggaagggcgatgctataccttctttaaaggacacctaccaatgtcttagttgcctttcaaagactcctagcacagctaaatgtgatggatatgctctaaggatataagagctgaagtgacttgcataaggtcatatcataacttactgttagaaatggagctagaactcagacccactgagtccttgtctgtgacacactgccctttccatttgtggaagttgttcttgtatctaactttatctgtgctactatttgggcctagccattctccctcttatgcagacaagcagataaacagtaaaactttaggagtggattatgataccatagatatatatcatctatcctttacaaaatagttattacagtcatcaagccttggttagagtttacagaccatgtatcctagctacctcatttcacagattatgacattgggggctaagagatattaagtgacttccttaagtgaaacagtagcagaccaaaagaagtcatgattcccagcatagtgctactcactcatttattcattcattcacccactcacaaacctgtattaagtttctgttatttgcaagaccctgtcagttaggccatgtgggaactagaaggatgaatttatcagtcatccaagattcttacaattaagtattaccgataaggtactcaagaaacagttctcattcacataatttgggttaaaacaaaaagaagccagctttctatatacttttggtccagtctttacgttttttgttttgttttgtttgttttcatgagtatcccgacttccttctaagaacttccacctgagaactgaccacagcgtcagcattccacatgggtgtgtttcctttcccctttcccatttcagtggtttccaatttctttttcttttggcactataaacctttcgcaaaggaaatattagacagaactcctacatgtcaagcaaattaaaatagtggtgaaattagagtggaggacataatcaccctatcatataggctatttgtccatatcatatttgtccctacaaaggcctctaaggcaggggtccccaacctctgggccgcagaccggtaccagtggcctgttaggaactgagccacacagcaggaggtgagcgggagacaagcgggcactactacctgagctctacctcctgtgagatcagcagcagcattagattctcatagaagcgtgaatcctattgtgaactgcacatatgagggatctaggttgtgtgctccttatgaaaatctaatgtctgacgatctgaggtggaacaggttcatcctgaaactatagcctacccccactcccacacccaatccatggaaaaattgtcttccctgaaaccagtccctggtgccaaaaatgttggggaccactgctctaagataccttgtgcttcttggaacatatttggaaaatcatgtagctctcaaattatccctatgtcctgaagcccaccttaccatcaatcctcagaaatacccaacccatgtcaggcaacttcacactttctttcttcaggcagcacagttgtctcagggagggaggagagtgctattagcaagaggagtcactaacagcttcactcacctgtgcccatgaatttttaatggtgtgaaaagtctgtgtattttttatggttctctatggctcatataagagggacaaacaatacatgaaagttcagagatggggacaaatatcactttaagctggggataatcagggaagaagaaagttttcatggagaaggtgacttttgaatcaggaagaaatggaaacagcaaactcttctagatagaggagacactaacaggaaaggcagagaggcaggaaggtgtgggaaagtgcacgtgaccccgttcagagagaaagccaggtgtgagataagggggaaagactgttagggcatgtattgtaaaccactaattccaggcaaaagttagattttacttactaagcaagagtgcttcagttagatcctagcaggaaatggagggtatgcttagaagaggtaactgaggcaagtttaatttataaaggtgtgtgcagcattaagggaaaccagcaagggatactgagcatgccaggatgcaagagcaggcagggaaggtgactattcctaggtctgaaggagaaaggggagggagcagttcccagaaccctagtaaaaatggcaatgagaaaggtccatctggcaggacctatggtctttaacagagggacaaagtcaacccacaacttgtctgggaggttgctgaggaatagataccccaacctctctctcaacccactgcaacactctttttcccctagactgagcccagtcaaagacagagggaggagcccagtgatgcagtctgcaatgtcatcatcctggagcatgaatagagtgcagcagggtgaataatgagtctgcaggaattaatagaaatatctgacacaatagggaactataagaggttttgaataggagaggcccctgaaatgtgctccaatattactgaactatgtgtggcccaaagaatggaagaggaacagctcttgcaataggtctgaggagagaagctgaagacttggactagggcaatggtaaaaactgtggaaagaagttttaaatgaaaagttttaaaccatgcggcttccagctagatgaacttttttaaaaaaattagttcctcactcaaattttggggaggttatatattttctaatcataaaaaatgatttttcttatttgtgggcttttctccccagatctgaacctgtggtcttgggagccagggtgacctgatatgacatctaaagaagcttctggactctgaacaagaattcggtggcctgcagagcttgccatttgcacttttcaaatgcctttggatgacccagcactttaatctgaaacctgcaacaagactagccaacacctggccatgaaacttgccccttcactgatctggactcacctctggagcctatggctttaagcaagcactactgcactttacagaattaccccactggatcctggacccacagaattccttcaggatccttcttgctgccagactgaaagcaaaaggaattatttcccctcaagttttctaagtgatttccaaaagcagaggtgtgtggaaatttccagtaacagaaacagatgggttgccaatagagttattttttatctatagcttcctctgggtactagaagaggctattgagactatgagctcacagacagggcttcgcacaaactcaaatcataattgacatgttttatggattactggaatcttgatagcataatgaagttgttctaattaacagagagcatttaaatatacactaagtgcacaaattgtggagtaaagtcatcaagctctgtttttgaggtctaagtcacaaagcatttgttttaacctgtaatggcaccatgtttaatggtggttttttttttgaactacatctttcctttaaaaattattggtttctttttatttgtttttaccttagaaatcaattatatacagtcaaaaatatttgatatgctcatacgttgtatctgcagcaatttcagataagtagctaaaatggccaaagccccaaactaagcctccttttctggccctcaatatgactttaaatttgacttttcagtgcctcagtttgcacatctgtaatacagcaatgctaagtagtcaaggcctttgataattggcactatggaaatcctgcaagatcccactacatatgtgtggagcagaagggtaactcggctacagtaacagcttaattttgttaaatttgttctttatactggagccatgaagctcagagcattagctgacccttgaactattcaaatgggcacattagctagtataacagacttacataggtgggcctaaagcaagctccttaactgagcaaaatttggggcttatgagaatgaaagggtgtgaaattgactaacagacaaatcatacatctcagtttctcaattctcatgtaaatcagagaatgcctttaaagaataaaactcaattgttattcttcaacgttctttatatattctacttttgggtaagaggtttgctcagggtcttgcaagtcagtaagtttaatatcctattacgccatttggctcccaaagatttgaaggcctttgaggcaaacttggatgtacttttcagcagggttgggtcctagggatgcttgatctggggctcctgctggaggaggagcacttcctaacaccacagagagcagggcaggagacaaggccttcttccctggaagaagcccacctatgctgcccctacccccacccatgccccagatatgtgattggcatgttgaatgcttggggagttttgtttaactctgttaggaacccagtggcataatggcttctgtcaaaatattcccatctttgttcctagattggggctatcttttagattaccaaatagggagagagcaatctagctgtagtatcctgaaatctgggttctgtcaggggagaaaatcataaggcaatgtgtcttagcttcagaaattttctatactacagcatgctatcttaacacctaacatttatcaagtacttgctattgcccaatattgttaagcattttacacatactattggaacaaatcatccccaaactctctgaaaaagacactattaattactccattttacagataaggaaaggcacagagaggttaagtaatttggttaaggctgcttgttcagtttgaaagggatggaattagagcaacaaacctatattttttgttacacaccataatgtgccctgatttcctaccacatggggtttaaagtggtatttttatactgtgtggtctctttgctggtcaataattaatttcagaaacaacagatgctggcgagggtgcagagaaataggaacacttttacactgttggtgggagtgtaaattagttcaacccttgtggaagacagtgtggtgatttctcaagggtctagaaccagaaataccatttgacccagcaatcacattactgagtatatacccaaaggattataaatcattctactataaagacacatgcacacgtatgtttattgcagcactattcacaatagcaaaaacttggaaccaacccaaatgcccatcaatgatagactggataaagaaaaggtggcacatatacagcatggaatactatgcagccataaaaaaagaatgagttcatgtccttttcagggacatggatgaagctggaaaccataatcctcagcaaactaacacaggaacagaaaaccaaacaccacatgttctcactcatatgtaggagttgaacaatgagaacacatggacacaaggaggggaacatcacccaccagggcctgttgagggggttgggggaaagcagagaagagcattaggacaaatacctagatgacatgttgatagattcagcaaaccaccatggcacatgtatacctatgtaacaaacctgcaggttcagcacatgtatcccagaatttaataataataattaatttcactcttttccagggaagtgctataggagtgtaggtggcgtgtgggttctggcatcagagattcaaaccccagctcaactaggtatgagttatacaactctgaatatattggttgacctctacgcatcagtttacttcaatatagtgagacctggccaggcgtggtggctcatgcctgtaatcctagaactttgggaggtcaaggtgggtgaatcacttaaagccagaagttcgagaccaccctggccaacatggtgaaatcccatctttactaaaaatacaaaaattagctggggatggtggcacgcacctgtaatcacagctactcaggagactgaggcaggagaatcgcttgaatctaggaggtggtggttgcagtgagccgagatcacaccactgcactccagcctgggcgacacagccagactttgtctcaaaaaaaaaacaaaaacaaaaacaaaaacaacaacaaaaaatgcatatatatatatatataaatagatatagtgatatagtgataccccatctctgcaaaaaatttaaaaaataaaaataaaaaaaatttaaaggggccgggtgcagtggctcacacctgtaatcctaacactttgggaggccaaggcgggtggatcatgaggtcaggagttcaagaccagtctggcgaagatggtgaaaccctgtctctactaaaaatacaaaaattagccaagagtggcggcgggtgcctgtaattccagctactcaggaggctgaggcaggagaatcatgtggacccgggaggcagaggttgcagttgcagtgagctgaggtcatgctactgcactctagcctgggcaacagggcaagactctgtctcaaaaaaaaaaaaaagaaaaaaaagaaaagaaaagataaagaaagcagttatctttctcagtttatcatgaggattttgagcacaggttttgtcatccccttagactcctagagagcagggaaggagtgagatttttgccatgtacctggtacgtgataggtacctcatgcatggtcacctctgagactcattatgtattgggagaatggctactattaagacttctactttttttttttttttttgagatggacttttgctcttgttgcccaggctggagtgcaatggcacaatcttggcccacagcaacctccgccccccaccaggttcaagtgattctcctgcctcagactcctgagtagctgggattacaggcatgcaccaccacgcccagctaattttgtatttttagtagaggtggggtttctccatgttggtcagggtggtctcaaactcccgacctcaggtgatccgcccgcctcagcctcccaaagtgctaggattacaggcgtgaaccaccgcacccagccaacacctttactttttatggcctggatataatgggctaaaacatatataatgacaatgcttaaaagacttagatgaattctaagtctggaaaaaaaagtactttttacaaaaggagcaaaaatagcattcaggagagtttgaggaattgagaaagaccaaacaaacaaaaatcacctatgatctcatcatccaagcacaaacactttcatgtttgctgtttgtttctgctctttgtccatttatgtatttaagtttggctatggttgcaacatgtaattttctatactttaaaaaatttggggctgggcacagtcgctcacgcctgtaatcccagcaccttgggaggccgaggcgggcggatcacctgaggtggggagttcaagaccagcttgaccaacatggagaaaccccgtctctactaaaaatacaaaattagctgggcatggtggtgcatgcctataatcccagctactcaggaggctgaagcaggataatggcttgaacccaggaggcggaggttgcagtgagccgagacagcaccattgcactccagcctgggtgacaagagcgaaactccatctcaaaaaaaaaaaaaaaaattgtcatctaccataagctcacacttatgttgctgacaagtgttcctaattatcacttttactggctgcataatattctactgagtggctgtgacaaaatttaattaactgttcccctattaatgtaagattaccgttgtttctggtttttttgccactttagttacaagcttttgtgctggatatcctccatttgaccctccagatccactctccagccttgtcctccctgctttgggtcctatgaagctgacttgtatggactgtatcaatgggctccattgctctctggcttttgattgggttcagccaatggggaccctggcaggagatcagaggatgggagaagagtattgctggggtatttattccccaggctctccgtctccagggtcactgctggctggataattctctcaactaaaggtcacagctcttgttgaatgaccctttccacatggctccatctgcctgtgggttccagtaactgctctctccagtccccttttcatgtctgggtgcctacgtgtcccctcaccccctgcaacacacacacacatgtgcaaacacacacacacacacacacacacctgttcctgctagcctttgggtactgcactattccttagagttccctacacctggcccacatctctacaaagagtctctttaattagtcctcaaattatacagttcagtgtcctaactgatatatcatgctatttcagataatgcatgtctttttacatctaatttcattaggatggatacctgaaaagggaattatggagtcaaagaatgtgaacacttcaggctcttgagtcatactgtcaatttgcttttgaaaaggatctgttggcattggtaccagtgcatccttccagcactggatattttaaaatataattttgctaagtcaataggttaaaaaatggtactttatggtaatttaagttttcatatcttggattaccctcaagtttgcttataaaacctggttattgctgtgtacgttgttattttggagtttgtttaaatgtttctcccttccccactcattctctagttgtataatctttccttaataattcaattttttaaaagatcaactttttaaagcctcaatgtcttcatctatttacagatatcctaacaataacacctctctcacagaattattgtgagaattaaatgaaaataagcatgtagcatataagaaacatccaagaaacatgaatgctttcctccttaataattatgcatggagtttaattaacaaattatgtctattttttaaaaaaattgtgtcagttttctttcaagtttatattgaaacttacttcataaaataatattatagatgagcagaacaattcagtattatccagatttgtttttatatattatgtgactttagaaaatttgtaacccttttaagccaaaatctttaaaaactatttattttattttattttattttattattttattttattttgagacagggtctcactctgtctcccaggctggagtgcagtggtacaatcatggctcactgtagccttgacctcccaggctcaagtgattctcccacctcagcttcctgagtagctgggactataggcacatatcaccatgcatgtgttacctcaggtctggtttctattatacagatcaagtaatgctttggcaggctacacatctattatctatttaattctttttttgtgtgtgtgtgtgacggagtttcactcttgttgcccaggctggagtgcaatggcacaatctcagctcactgcaacctccgcctcccgggttcaagcgattctcctgcctcagcctcctgagtagctaggattacaggcatgtgccaccatacaaaaataattttgtatttttagtagaggcggggtttctccatgttggtcaggctggtcttgaactcccaaccttgggtgatccacccacctcagcctcccaaagtgctgggatttcaagcatgagccaccacgcccggcccacatctatttaattcttagagccaaccaccaccaaagattattcctgctggtaaaaaatgctgatcgctactctgggatctcatcatctacattgagatcaggcagattttcccaccacatccttggcctatagaaagcagctgcctgaacatgttcaagggtgctggggcttctcccattaaagcatttttcaatgctttagagaagaaactattccttaggctctttcaggaccaagtgtggtgagggaagaggcacagttacatataataaatcactcctttatttctatctccttagagattctaatggcttaggccattagaatccttcctatacattattccagagaaattctggcaactcaacaccattaaatgtaacctaccagtgagtccaaatttcagccaatcaactaagcaaatagtgccattcacagctgctctagctaatacatttgtttcagctagcttttgttgtataacaaactatccaaaacttagtgacttaaaacaactgtttatgtttttatgattttataggataacaatttgggctgggctcagtggaggcaactcatttgtgctctacgtggtgtcagtgggatcattcatgcatttgcagtcagttggcagtttggctgccagatggctggtctcagatggcttcattcatatcttcctattggtgctggctgttggtaaaaccacgtatcttcagtaggttagtccaggcatcttcaacatagagtctaatccaaaaacagcaaaaaagaaagaaaaccccaatgtgcaagtgctttccaagtctctgtttgtatcacatttgctaataatgttccattatccaaagcaagcacataaccatgccaaaaatcaatgtgtaaaggaattacatgaaggcgtgataccactactgtaatcatctacaacattaagtccaaaactatctggaaagtgtagtatatcaggactaccttaatttggccccagttcaatgttatcttctgtgctcctgggtctaatacctttagaattcatccccatacatactagcctggtttcctctaatgttaagttaacaaaatcttatgattcttttgaagtataagacttttcctgctgagctagactctgctcttcccacctccgtatattccgggaactgactctaaataaaggccatgagagttgggagcactggggctgagaaagaatagggatctcccttgcaaggcaagtgcctcatatgggcttattacaggctttcaaacaaggaaaggctaatatcattagacaagaaatgagaggcttcttccactatcaagggaaactcagggatgcttgggggtttcaacattctcagtttcatccaaatccaccaaaatgtccccattcctagtctcagagtcctactcctttcaaattactgagaaaactttcacatatgagacttagccagtctgtgaatgattgatttgggttgaatttttcagtcatgtctttcatgtctagtgattcctgtaattagaaggaataagaggtactttcagggcagtcttagaagccctctggtgctctgaatatgatttgaggtgaaagccctaaacttgttagtttcttcctgtaagcaccctggtgcaatcagaagcagccatcccacattacattccttataatcatctttactaccataatggttaaatgcaacagctacttggcctccagaaacttgcctttcattggtattcaaccctagcaagaacagatgataatttaatcaaccatgatgtcaatgcatgccatagattactagtggcaaagagttcagctctcaattcaaaccaatccaacactaacaacaaatcaaatcaatcccagaatgtcagaatttgagaatctgtttcctatgaccacacctagtatcaagtgctagtatcagccagagtccagtcataaaaatagagtgtatttaatattaggaacttgtaataaagatataagaagactgaaagagcaaaaaagtggatgccaaatattagaactacagacagcagctacctttctactacctattgctacaggcatgacacattcaggaactagaaacaggaaataattccccctcccaccttccagtccccaaggccttcccatttactgaacttaacaggaagctagctggcaagggaggctggcaaatgaagtttgtcaaaattccagccctggcacatcagagcagaggagaggaggatggacttagagttgagaacaggaggtacataaccaactcactcctcaatcaaaatctatctggatgaagtggagacatatccattaagagataaaaaataaagagactataaattccaattagattgtagcacaaggaattgtcttaaactctgtggcatctgaccctgtaacaagggcccaatgtatatttgttgattggttttatgagaaaaataaaaattgggcatctgctttgaccatgagcataggacaaaataaacttatttatttatttatttatttatttatttatttatttatttatttatttttgagacggagtctcactctgtcgcccaggctggagtgcagtggcaagatctcggctcactactagctccgcctcccaggttcatgccattctcccgcctcagcctcccaagtagctaggactacaggtgtgcgccgccatgcccggctaattttttgtatttttagtagagacggggtttcaccgtgttagccaggatggtctcaatctcctgacctcgtgatctgcccacctcagcctcccaaagtgctgggattacaggcgtgagccaccgcacccgggcctttaagtacattttgtagaagttgtatcaaaattcattggctgcaaatgagagaaaacctgatgcaaactggcttaaatttttaaaagataatgtgttggcttatgtaactgagcagccaaatgtgcaactgggtatagggggtctaacaaatgtcttcaggattcaaattgtctctatcatttcttcactctgtttcctttttgttgatgccattctcagacaagatatctcctcataattacaagatggatgccaatgattattaaacctttcagattcaaatattttacaagaaaaaaaagccagagtatttttctcagcattctcagcaaaatcctgagatttacagtggaaaacttatgtgctgtgccctctccagaaccagtcactgaaagaaagagtatgtaagtgatatcttacatctggagctccacccagaccacatgaactgaaagtggagagtgaatcaaagtgacatcttttgtgctaagatgttgcaattgcccaaatgcatctgtggacttctactagaaggtatagcagaaggtgttaggtgtctattataagaaaaatatcactatcatataacacccctgggggacatatttctaaatttcagacaaaatatattttcagtgcgttgtctttcctgataatgtatttacagcctgtcatgggatatgtctgttttaaagtgctgggcagggtttggactacatgttcctccttgtgctgggtttgaaacattagattgccaatgtctcattgctggtatccaaaatgaggtttaattaagtttgccattatagctaatctccataccatgcaccagacattgctctaatagcttcacatgtatgatctcatttaaacttcataacttagtgtattgtcttgtctattttacacgtgtattagtccgttcttgcattgctataaagaactacctaagactgggtaatttataaagaaaagagattttattgactcacagttccacaggctatacaggaagcaaggctggggaagcctcaggaaacttacaatcatggcagaaggtgcaggagaagcaggcaggtcttacatggcctgagaaaggaagagggagagcagggggaggtgctacacacttttaaacaaccagatctcataagaactcactcattatcatgagaacagaaaagggaaattccactcccatgatccaatcacctcccaccaggcccctcctccaacactgggcatcacaattcgacatgagatttgggcggggacacaaatccaaaccgtatcaacatgtaagcaaactaaggcccagtgaagttagataaattgctcacatcacacagctagtaagtggcaaagctagatcttaagattttgcaagccagacatgacatcaggccaaatatcctacacctgtaccagtcaagccttcattatatagtattttataattacatatgtgttcagttttctccaacagcctttgaggtattaggaggaggacctggtattttattcatttttatagtcccagaacccagtacaaggattcgcacatagaagatacttaacaattatcatggaattgaattgaaagcagtgtgcatggagtcgaggcaagagaggccaatatggaaaaatatttagtgaatctccagcatgtccaatggagaagggtctctgtccatccagcccacatgttcctaccacctgtcagatctattcctcctatgtgagtgcatcagtcatgtagcttgttgacactagtcattaaaatcattctagccaccaccaccatccttcaccccatctatggtctatgcttactgagaaacctgagtataatttgacttcttatatagggttttctataggaatagactttttaaagcaacttctgatatgcatgtcaatgg

SEQ ID NO: 262 - DNA, 2669 bp, Homo sapiens
gcaaaccttaagctgaatgaacaacttttcttctcttgaatatatcttaacgccaaattttgagtgcttttttgttacccatcctcatatgtcccagctagaaagaatcctgggttggagctactgcatgttgattgttttgtttttccttttggctgttcattttggtggctactataaggaaatctaacacaaacagcaactgttttttgttgtttacttttgcatctttacttgtggagctgtggcaagtcctcatatcaaatacagaacatgatcttcctcctgctaatgttgagcctggaattgcagcttcaccagatagcagctttattcacagtgacagtccctaaggaactgtacataatagagcatggcagcaatgtgaccctggaatgcaactttgacactggaagtcatgtgaaccttggagcaataacagccagtttgcaaaaggtggaaaatgatacatccccacaccgtgaaagagccactttgctggaggagcagctgcccctagggaaggcctcgttccacatacctcaagtccaagtgagggacgaaggacagtaccaatgcataatcatctatggggtcgcctgggactacaagtacctgactctgaaagtcaaagcttcctacaggaaaataaacactcacatcctaaaggttccagaaacagatgaggtagagctcacctgccaggctacaggttatcctctggcagaagtatcctggccaaacgtcagcgttcctgccaacaccagccactccaggacccctgaaggcctctaccaggtcaccagtgttctgcgcctaaagccaccccctggcagaaacttcagctgtgtgttctggaatactcacgtgagggaacttactttggccagcattgaccttcaaagtcagatggaacccaggacccatccaacttggctgcttcacattttcatcccctcctgcatcattgctttcattttcatagccacagtgatagccctaagaaaacaactctgtcaaaagctgtattcttcaaaagacacaacaaaaagacctgtcaccacaacaaagagggaagtgaacagtgctatctgaacctgtggtcttgggagccagggtgacctgatatgacatctaaagaagcttctggactctgaacaagaattcggtggcctgcagagcttgccatttgcacttttcaaatgcctttggatgacccagcactttaatctgaaacctgcaacaagactagccaacacctggccatgaaacttgccccttcactgatctggactcacctctggagcctatggctttaagcaagcactactgcactttacagaattaccccactggatcctggacccacagaattccttcaggatccttcttgctgccagactgaaagcaaaaggaattatttcccctcaagttttctaagtgatttccaaaagcagaggtgtgtggaaatttccagtaacagaaacagatgggttgccaatagagttattttttatctatagcttcctctgggtactagaagaggctattgagactatgagctcacagacagggcttcgcacaaactcaaatcataattgacatgttttatggattactggaatcttgatagcataatgaagttgttctaattaacagagagcatttaaatatacactaagtgcacaaattgtggagtaaagtcatcaagctctgtttttgaggtctaagtcacaaagcatttgttttaacctgtaatggcaccatgtttaatggtggttttttttttgaactacatctttcctttaaaaattattggtttctttttatttgtttttaccttagaaatcaattatatacagtcaaaaatatttgatatgctcatacgttgtatctgcagcaatttcagataagtagctaaaatggccaaagccccaaactaagcctccttttctggccctcaatatgactttaaatttgacttttcagtgcctcagtttgcacatctgtaatacagcaatgctaagtagtcaaggcctttgataattggcactatggaaatcctgcaagatcccactacatatgtgtggagcagaagggtaactcggctacagtaacagcttaattttgttaaatttgttctttatactggagccatgaagctcagagcattagctgacccttgaactattcaaatgggcacattagctagtataacagacttacataggtgggcctaaagcaagctccttaactgagcaaaatttggggcttatgagaatgaaagggtgtgaaattgactaacagacaaatcatacatctcagtttctcaattctcatgtaaatcagagaatgcctttaaagaataaaactcaattgttattcttcaacgttctttatatattctacttttgggtaagaggtttgctcagggtcttgcaagtcagtaagtttaatatcctattacgccatttggctcccaaagatttgaaggcctttgaggcaaacttggatgtacttttcagcagggttgggtcctagggatgcttgatctggggctcctgctggaggaggagcacttcctaacaccacagagagcagggcaggagacaaggccttcttccctggaagaagcccacctatgctgcccctacccccacccatgcccc

SEQ ID NO: 263 - protein, 269 aa, Homo sapiens
MIFLLLMLSLELQLHQIAALFTVTVPKELYIIEHGSNVTLECNFDTGSHVNLGAITASLQKVENDTSPHRERATLLEEQLPLGKASFHIPQVQVRDEGQYQCIIIYGVAWDYKYLTLKVKASYRKINTHILKVPETDEVELTCQATGYPLAEVSWPNVSVPANTSHSRTPEGQVTSVLRLKPPPGRNFSCVFWNTHVRELTLASIDLQSQMEPRTHPTWLLHIFIPSCIIAFIFIATVIALRKQLCQKKSKDTTKRPVTTTKREVNSAI

SEQ ID NO: 264 - DNA, 27091 bp, Mus musculus
  misc_feature (1)...(27091): n = A,T,C or G
cgaggaaccaggcatggcaggaaagccaccctggagagcccctgccaggcggcccactgcttctcagcagcctcactgtgggtgagactctgtgggatcccacgtcctgtatgacttgcccagtttatcagcacccgggcttctgctcagtgctcagcatacgcctatttctcctgagctgtgtgtgctgatggtttccatgctggggagggtctgtgaggaggtcctgtgaagaggggaccgggagctgagggattctaggcaggggctctaccactgagccacgcccccagcccctcactgggggattctaggcaggggctctaccactgagccacgcccccagcccctcattgggggggttataggcaggggctctaccactgagccacgcccccagcccctcactgggggattctaggcaggtgctctaccacagtgctacagccccaacacatttctgctcaattgtgataaccaaatctgtgtgttggcattcattgtcagatgtctaggacccaaatcaccttgaatgaaacccaccgggcaataggctgggccctgcagacagcaaggaataaggtagccctggctacggagtgggaggagcttcagaagatcacctcccttccatgttagcctcggctggtctctgtcaccctgcggcctcctgtttcctgttttggtgaatccctgagccacctggcaatgccaactccaacagtgcctacacctcctgcaagactaaactcttcctttgattaatccctcctaaggaagcaaggaaagacaacaaaagctggtctaggcagtttcccagcccttacagctttctccatcttaaggctccaaggacacagacctagaggctcaggtgagcacactgactaacaaggacttgccatatcccgcatttacttcatctgctgtgccttccctgggctcgcaagcctgctgtggctctgtcctctcctcccaggtggcatcacggccctggactttaggctccagctcatcctggtttctattgcattgggtgctaccttcacccatgtctaagcatacaacctctccagacaggacaggacccctctgcctgccccaagtgtctagtccctatgatgggtcaacaagatgattcaacaggttaaagtgcttgctgccaagcttaaagacctgagtttgatcgctgggaccaccatggcgggaggaaaagccaactcctgcaagttgtcctctgatctccacatacatacatggcatgcacatacatgtatacaagtaaagagatctaaaaacaacaatttttctttttaattcaccacattaagccaagaacagtgcgttcatacccatgatgaggctaacccatcactcgggaaatctgaggcaaaaggattgcttcgaattttaggctagcctagggtacatctggagacctgatatctgagttaagttaataggagcgaatgagttggcatggacaaagtacctgctgtgaaagcataagagctttaacccggacccctagccaggtcccgtggcatgcgactcacctgcaatcctgaggctggggagggcgtacaggtgggtccctggagctcacagatcagccgctgcagcccaaccggtaagctctaggtttagtgagagaccctgcctcaaaaagtaaggggctgagggatagagaaagatacctgatatagatgactgtcctctacacatgaattcacagatgatctctctctctctctctctctctctctctctctcgctcgctcgcacgcgccacgcgcgcttgtaagggactgtgatggacgaatgggtgaagcagaagggagcatgggtgaggcagacaggaaagtgagaagtaagcagagcccatcactgactctctgacgctgtgctgatagcttgtctctttggaggtgtgcttgtcattctggtacagagccccccaccccccagccctttccacaccagcctggatgatctcagatgccatttctatttcatccttaggaaggtgaagaaagctggcctcatggtaaagacctgacatcccagttactcgagggatggaggcaggaggattgccagttcgggaaacagtgagattctgtctcaaaataaaagtcataagagggctggtgagatggctcagtgggtaagagcacccgactgctcttccgaaggtccgaagttcaaatcccagcaaccacatggtggctcacaaccatccgtaacaagatctgacgccctcttctggagtgtctgaagacagctacagtgtacttacatataataaataaataaataaatctttaaaaaaaaaaaagtcataagagagctggaagtatggctcagtggtagagcccctgcctagaatcccccagggaggggctgggggtgtggctcagtggtagaatatctacttagcatattgagggtttaaattcaactcctattatttagtactactaagtaatatacaaataaaacaaagaaggagaagcatcagatcacgttcctgaggaagagcttacagggagagactccatcattcagtaagcagagtcctatttgagactctgactatccaggccagagcctcctcccactgtctctgggatcctattccaccgccttggcatggggtcacgaccaggaggctccagaaccactgggctcacccctgcctgcctgctgcaactgcacaagctagccattcttgaagaaacaaaggctggctgggttgtggtggctctggcgtctccctggagggtgtctggcctctgcaggatgttggggagtggatctgggtggtggttgaactctgtcactgggtatcgcaaatcacattaagccagcccttcacccctccatgcagtccagctgccctctatggtcatagggctttcagtcagctgcttaggcagggatgcttttggctcccgggcagttgagttctccccatgctgtgcagacccttgaactcctgtgcaatacctgtgatactgctccctgcgaagagttcgtgaaacctagtattggtccccaacttcctccttgagatttgtgtcctgggccagctcagaagtcagtaggtgtccctgacacaccttcttattcccaagaccttgtccttggaggacaaggggcagcagactgagtccttaccccttcgcatgtgtgcatgtgtgcatgtgttcatgtgtgctctgccccctgacacctgatacctaaccattactcctacagtagacaccaggctctgctttaggcatgggctcagccttgatggtttctgctctcatagcactgacatgtggcaccttcacagatatccatatatcctttctagtgtctagccatccactgtttgtttggttggttttggtttttcaagacagggtttctctgtgtagccctggctgttctggaactcactctgcagactaggctggccacgaactcagaaattcacttgcctctgcctctcaagtgctgggattaaaggtgtgtgccaccactgcccggcttccatctgttgtttacacatcctcttaccattcatctatctatgcatccatccatgcatctacccatctatgaaaccatccatttgacatcccatatgtccctccatcctctcacccatctaccgtactgtttacacaacctctaactcattcacccatccaagcttccttccatgcatctatccatttatccatccattcatgtatccatccatgcatccatccaacatcccatctgtccccccacccacccacatcatctacacatcctcccatgcagcagactacccatccatgcatttgtccattatccactttacctacccacccatcccatccatccacctcccacacattccattcacacacccccactccatccattccccatcacctaattgctcattcatctattcacacatccactcaccctcccacccatctagccaccccattcacgcacctacagtctgtctgtccatcctctaccccctgtgcagcatgacccttgaaccctgctttgtggcagatctggatgagaagtgaaatgttacccgcctccagggagggtgggagatgaacaggctgttcttgtttaccaagtaagtaagtaagtaaataccaagaggaggggttacaagggctgggaaaggggaaccatttagggcttatcaggataccccaaaccagagtgccccctgaagttttgcccagccacttggtcaaaggaaccagactctaacccacactggggtccaggatcaatcaagcaactgggtccatcgaactgtgcctgcaaagcgccaggacggaaggcgccagcgccgtccctattacagagtagagtgaagccctcagcctacagagagtcgggaactggcccaggaccacacagaatgtggcagtggtgaggggtactgggaggagcgggcagagcgggcagatgggtggatctgcatggggcggctgtctcttgcagctggagtctgtcgaatctgttctcgggtagtgcccaccccagttgatgggaatcagctgctgtgttaattctacccttgtattcctccatgcttttgcctctgccctccccctctccccactggagctggctgtactgaacttctagccaaccccttcccttcccccttctgccaggagtgacagaaccttctgtactgagcctcaccgggccattttgattgagccccgtctctgctgtatgtgtaccagatttaaaaaaaaaaaaaaaaaaaaaaaaaaaatcccagccctacctcattgtactgccttgcagtggctttagggatacatttatccttgggcatgtgtgtatgtgtatgcatgtgtgtatgtgtgtatgtatgtgtgtatggcacacaggtacacatgtgtgccagtagagaccaaaggtctcaacctcagattttgcttttgtttggtttggttttgttttgagacagggcctctcactggactgaatcaactcaacgggtaagcaagggtagctgccagtgagccccgggaagctgcttgtctctaactcctcagtgctacgattataagcacacaccatcatgcctggccttttatgtggcggctggacattgcacagtaaacactttgccaactgagctatgtcccctacttttggtttttttgaaacaggatttcatgtagctgaggctggccatgtttttctgattctcctgcctctgccttttaagtgttgggattacaggtgtgcaccaccatgcccaacctccctggcttccactgccctgctaagggagggctggttcccagactgccagctccaagaggtggtgggtgtgggctgctttggatggcttcctgctgagttaatagttcacgtatttggtctccatagatcttcccaggaccctgcatgggagggcaggcaactgtcggggcctcaagacaccaggaggagggtggtaggcagatggccagttccaacaattcccaggagactacaagactaggccagggaagaacctgtgtcctcaggacttcgtgagtttgacgtcagctggagagccctggctcattctacaggggtactcagtttcaacagtcacttgggcatctaccaaccagggactggcatagtgaatcagagtgcaaaaactacaccttgagtctgagagctggcacccttacctgctctgccacaaaatgacaggggacccaactaggtccccgatgtcagtaaaaaaggaaaagttaattttagtgacttgaaatgaaagctgtgactcaagtcacattaggggacatcaaacatacaagattcaaatcctgctcagtgagtgtgggggaaagattgtatatgggttctgattatagagagggaaatgacatggaaaataaagggaccaaggggacaggtacccagtagcgtcagaaaaacaactgtgaatgtctcaatatgtctcctggcatgacaggtaaataaagagtttctctggaatctataatatgatggtcacatcctggatagtttcttgttctctatgtctctcccctctttgttattttattttattttattttatcttatgtatctaagtacacactgtgtaggttcagatacactggatcccattacagatggttgtgagccacctgacctggaagcttctatatagaccaggctggccttgaactcacagagatctgcctgcctctgcctcccaagtgctgggattaaaggtgtacatgaccacactaggcctgatgctctctctccctttaacatcatccatggcccactagccttctctccagcttcaaggtcagtaaaatcccaggactgtaaggaaaaggaatgaaactgaggcccaagaactcacagcctcagagagggtttggcttagcagtagagcccctgcctagaatccctcagtgaggggctgggggcgtgactcagtggtagaacacctgcctagaatcccccaatgaggggctggggcgtggctcagtggtagaacacctgcctagaatctcccaatgaggggctgggggcgtggctcagtggtagagcccctgcctagaatcccccagtgaggggctgggggcgtggctcagtggtagagcccctgcctagaatcccccagggaggggctgggggcgtggctcagtggtagagcccctgcctagaatcccccagtgaggtgctgggggcatggctcagtggtagagcccctgcctagaatcccccagggaggggctgggggcgtggctcagtgggagagcccctgcctagaatcccccagtgaggggttgggggcatggctcagtttagagtgttcactgcctgcaccctagtatttcccctcccagaactttttctgaggaccctaggggcttcccgaatatcctgatcttccctctctagctcctcattttctgtcctgggatgagcgccctaccctcccatgcccagtgggtgtctgcagggagtccatgggtccagaggaagggagtaccccatgagctcagtgcaggaagcaatagggagaggcgagctggttatgtctccctctggttttcagacctcaaggaggaaccacgaaattccaatcttctgacagcgaagaaactgaatcactcttgccagagcctgcagcccccacaagaatgcggtaaggctttgacctgccgttccctgtccagccaccacagtcagagctggttggttccttactccatggccgacccggtctcccctgcatggctcctctgtggcaggcatggacactgcaccagcccctctctgggcatcaggttgctttctttacaatggggaacatgaggacttggtggtagcggcttgacatggtcccaggcttgggatgaaggcgcaccaagactgacaaccagctatgacttggtcaggtgggtatggaaggaaggcataggtagtttgtttcctctcctgccgtcagagacttgataaatgcccacgaaggtatcttccctttggtttaaatggaagccatgcagaaagttagggtgattaggggacttgagctattgggaaatgaagacattgtatgtgcggggtggggggacacggggtaggaccaccacaagacatgtggataccaggagagtcttgaattcataggtgacaacagagagtcatgctatagtctattctgtgtctgtgtttgtgtgagagagagacagagagagacagagagacagagagacagagacagagagacacagagaaagtagaatggaggctgccaagtggtccaggagaggggtctcaaggaggagccttagacctaaaacactcggaagacacatagatagtttttggtgggaatggattagcccctgaggctgaggctggaactggggtgagtttatttggagagcagtccagcagatagcaggtaggactttttccttgtccttgagggaccaggctctggcaggaggaggaggggtttatagcaggaggtgacgccatgggagctttgtcactcgggcacagccagcaccatctgcttaggcatctgcctaccagaggtggtgcctcctaattacctggggggaggggtcaggaagaagcctgggaaccaccatatcccactccctcccaccacagaggggttgcagtgtcccacagggccctcagagcaaatggaccagagatccactcctgggtggggtgggaggctggggggtggggtggggtggggagagccctggctacacatcaattcaaagtcattttattttatatttgtgatagggtctcatgtagctcaggctggactcaaactcactatttgccaaggaatatttggtgcagagatgaaccgaggcgtcatacatgctaggcaaacactttaccaactttgccagatgaggtacatttcaggcgctcttttacacggcagcaggggctgacccgatattcactctgtaactcaggctgcctttaaatgttcagcaatcgtccaagcctgctacatgggctatcatgtctgtcttcattttgaaaagaattttgttgaaagcaggtgtgcgtatgtgtatgtgcgtgcgtgcgtgcgtgtgtataaatgtgtgttgctcaggccaagttgcacgtgtggaggtcagagggcaacatattgttggttctttctgaccatgtgggtcctgggaaataaactcaaatctgcctaggtgacagttgcgtttgcccactgaaccatctggccagcccctgcagtaagtctttacctgatccagcctgatgccttcttttaacctccaagagagggacggacattaagaagagtgtagtagagaaataattagaaatgatactccggtctaaaatataaacgctagggagtcggcgacagaaggaacagcagtttatccgtggtggcagggtgggctcagacttcctttgaagggggacgcggaaactgaagccaaccagacccaggggcagccaggcggagagccgcccccagctgcgctcccggaagatgcagcaggctcgggctcggaccctgctcccactccaggggacccttggccatttccggacccgtagcctctcaccctaccattaggcgcacattcctgccgcccccgctcgtgctaggcgcaggcaaggcccccgcccgtgggaagggggccgtgtgccggggaggcgggtctgggatggcgcacagctgggtcacatctggtaggagtgcggaggaaccaaatggaacagaaggtagcctttcatccttcgaggaaagaggctgcttgagtgtctcctcgctacggggtgcctgaggtttttggggaccaaccctccccatttaggaacatgatgccaagacaggcctgcctgggggaggagggaaggatggaccgacggagggacgtagaattttgtcactgatacccttttgcctgaacttcaggtccactcctaagacataagtatcagtaagggcagctcaaaattaatcgctcaggacacactgcaggctaccactttggctcagtcagcaccgttccccagggaaggaaacccgctcggggacaggaaatgcacagcgagaagccaaggatgtcgcccgcggaggagcactggccctatcacccaggtcccagcttcgggggcgcgtcctccacgtgcagccgtggcgggcgttggtcaggctgggtgtctcccagagcagctccggagggtgactcggcgcaggcgggacaggctcgtgcacaaagggggcgggtgccgtgggtaccccagctgggtggttcccagccccttgtccgtatcccacgtgggaaggagagatctccctaaaggttacgccccaaggctagcagccaattagcgcgtggaggcgtggcgggcaggggaggtttaagagttcctgaagcgagaggcgcgcagctggaccgggagcctcgggcagccggaccagttggcactgggatagatattacgtgcggccgccggccaccatgctccagcggtgcggccggcgcctgctgctggcgctggtgggcgcgctgttggcttgtctcctggtgctcacggccgacccgccaccgactccgatgcccgctgagcgcggacggcgcgcgctgcgtagcctggcgggctcctctggaggagctccggcttcagggtccagggcggctgtggatcccggagtcctcacccgcgaggtgcatagcctctccgagtacttcagtctactcacccgcgcgcgcagagacgcggatccaccgcccggggtcgcttctcgccagggcgacggccatccgcgtccccccgccgaagttctgtcccctcgcgacgtcttcatcgccgtcaagaccaccagaaagtttcaccgcgcgcggctcgatctgctgttcgagacctggatctcgcgccacaaggagatggtgagacccagcgcggcctgggcagggggatgaagtggggatcaccctctggtccaactggtgactgacgatagcggttcccgatgcgttaattgctttgggtctatctgggaaacgatgacactgataaatcccattacagccccgtgtggctgctggggttcactttgccttactaccctggaagcttccttccgtgttgcccagggtcaccccagccacatgctctgtgtctggatgagtcgcctccagcttagggctggctctgtaacgcttctcctaaacactggagtgaatggccatatttgttcctaaactttttcgagcaaattggctcagttccatcctgggtccccttcactccccttccttcttcctgggtggaaggtacgcccccttgaaagggagggaggaaaaggcatagcacacccctggaccaggcaaagtgaaagaaatgggtgctagttctccagacttgctcagaaccctgacttcagtagctcagctcccccacctcctgttagaccaacttcatacacataataaaaagacacaccccactttgaaaatctccctggaggctacaacaggaccgttggggcgggagagcagagtgcactgcgtgtgtgtgtgtgtgtgtgtgtgtgtgtgtgtgtgtgtgtgtgtgtgtgtgtgtaggggtgggggtagatatttggtgtgaagactaagactcactttccttcctgacccagccccagtgagacttcgctttaggacagtggaggttaagaggacaggctcctatctagtcttggtcaaagaggggccctgagaaccccaccgtagcctcctgagaatgaggcgtccctttcccaggggctcagcaggccttcgggagggggcagcggggggccatgggttttgtttggctgtggtgccgttaggattcccagcgctaggctgctctcacgccggccccttgggcaaggcaacaaagcccctttctccagccgagaaaggcgtcggcctcttgtgtacagctatgcgctccatgggaaccgttggctggcgtgctggccactcaggttgcctggtgatgagggggcctctgtgtcctccccccagccctgaatgacagccctcgtggggcacgatccctgagccagggcattcccccaccccttcattcagccttcctgctgtgtgatattggatagcatctatcccactctgggccactatcggttctgagaaactcttattcagggatttgggactcagttggactgtgtggtctggtgagaagcctagggtctctctgatcctctcttgctctcagaaaagggaaatactttctagtgaggtattataaagtggactgtagaactttggaggctcttggtgatcccagcagtcattctgaataagggggccccctacccagaaaatgctgcatttactgccatgctcacctcccgtgcacatgacaggcaaagcccccctcttgtgtgctatgatcaggggctcttggaacctgtagcaaagggcctgctcccctgtctgtccagggcggctgcagtctgatggaaggtgagagaggctccattaacctggattggggatgaatggaaggaaggcttcctggaggaggaggttccatctgcatcagagtcctagggtccaggaagggcaatcttggcaccaggcatgactgtggggctgtacaaaaaaaccaagcaggctcggtgaggtggagaggctggtcaggggtacaggcagagcgcctggcctctggcccgctgctcctcccccaccactaaggagcgcgccaggctgcaggctgccaccgccacagccacaatggctggggcagaacttggcatcctgtgtttctttgaatctcggttccaggaacaatgctgcttcctgtgtgtctctcccccacccccttgcttgccctcaccagctctgctgcccccctctgccctgtccgtcctccttaggggaagttggtgggatggggacagactgagatcagggtctcccattacttcttcctgagtgtggccacaggccagtgtcctctctggtctcttaactatatgccaaggagaaaagaagatggtactcacttcccagggacacttgggagaggagagtccatccctagcacttggctgtgcacaggcaagctgtgttgtgcccattttacagagtttccggtggactgagtgatacccacaggtacccctgcccccctcctctcctgtggagatacaccaggcagaatacccacacaccccacactcagcctctcaaagactgttctctgggcctcccccccccccccccccactgaacaaaggtgactttaatctccgtagccttgggctgggtttttaggacaccatcgaagcgcgggagaacaggcctctctcttgatctcattaagaaagcattttccttttaatccagcagcagcgtctgcacaagccggccctnnnnnnnnnnnnnnnnnnnnggggggggggtgtgctggatgcaagcgagtctgtgcgtgtgggctcccccgggtgtctgcagagacctggaaggagggggtgcatacttgcagatgatatagatcccacatttcatctcctaacctgggcttcactggagtgagcatctgggtatgggatcagcctgggtaaaggagtaaggctgctcgaggcatggtgtgccacccttgtagacctggggtttcttgggtggctggctgggtacatgctgacctccgtgtttgcatgctcacacccaggtttccttgggacccttttgtgcacaaaagcagagggaaggctggtggatgttggggagcctgctgcctctgctgtgagcagcccccaaccgccctagggttgcactctgcaatgccagggtgcggcagtcggcacgcgctgggcgggccggcggaggaaggaacattccttcccgtgtgccgacgggcccaggcgggcgccggcagctcctggccccgccccggcgcccccctcctcttccgcagtgcaatcctggcagggggtggcccagcgctgggccaggtggagtcttggctgtggccctgggcaaagccttctgtaagcggggaacagttttcctctctgaagcctcacccggctgctcagataccccagtgggcctggagacatgaatccttttctgctactaccatgttgaccgccgtgacctcccagaacctgactgggtgctatggctggggaaacctcttctatggggcacaggaggaagtccaggccagagtcgcgagcgaccaatggccttaccccatactcccgcgcacaggacctcttgcccagccggcccagttaaccaggccagctgtatggaaatgacagcccggccactcctgcttaactcggcagagttaaggctggcccagcccaggacaaagctggcggacaatggctggtgattcatcctcccttcgggtccctttgtctgccagggcttggcagcggcccagcagaggcctttgtccccgacccgagtgagtgaggctcagcttcccaaagccgacctcctcctcctgtcccccgccccctcccacagcttggaaagcctgcaggctgggcgggctggcaggctgtgtcaataagggtgtgtgccccgccaggtgcacaggttggcggagggttagttgaagcccgtttacctggctggtggggggggcatcccacctggctcgtgcctcccagctgcctgtggtgaccttgggcccacctgtctgaagttggagagtgagcccacctcccccagccagccagcccgccagtccagctgccactccccctgggcacttgagcacacattctgtgtgcagtggagaattcaggcagttcagtgcagggtgggggaggagtctagattgggtgccttggctgtggtcctcgtagggcactttggagctggaaggctcaagatcctgtctcttcttccagacgttcatcttcactgatggggaggacgaagctctggccaagctcacaggttggtcccaggcttgggggtggggatgagggtgggaggcgctggtcccaagcaacttcttcccccgaggctgtgaggtcactggctgccgcctcggggctaagaggccagttcactcggcttgtttgcttcatgccccgccccaccactccccgggccccgattcttatgcagaggagaccctttcagtcctctggggaccctttgagtcccgcttagcagcaacaggtggcgggtactgggggaaaaaaaactggctgaatgaatgggcagcggtggctaccctggggagggggctaggctgggcagggctggggctaaggttcgaagcaatgagaaatgcctgccgcttgtgcggaccaggcctgcttacgggccctccccgtccacaggcaatgtggtgctcaccaactgctcctcggcccacagccgccaggctctgtcctgcaagatggctgtggagtatgaccgattcattgagtctgggaagaagtgagttcctacctttccctctgtgccccatccgtgccccttccctggcagcccggcagccctcgacccctgtctgcagcccctgacagcatccctcccgccttgtgttcaggtggttctgccacgtggatgatgacaactacgtcaacctccgggcgctgctgcggctcctggccagctatccccacacccaagacgtgtacatcggcaagcccagcctggacaggcccatccaggccacagaacggatcagcgagcacaaagtggtgagtgtctcccagggtagcacacaccctgaggtgttagggaggggctgagccacctttgcaaccaggagtctcctgacagcccttgtttcacttcacccagagacctgtccacttttggtttgccaccggaggagctggcttctgcatcagccgagggctggccctaaagatgggcccatgggccaggtgagtgtcccctgcctagttgccactacccctgacagcagactgttcctggtgctcgctcttggtcctgggttccctgcagcagcagcgtctggcttgggctattctctccctgccttaggtagctgtgttttctgccactctctctacctctgataaagtcttcggcatggaaggactctggctcatggcggggcggggcatagtggactccctctttttggggccagtttggcaaagtcttgtctactcatggcccagctactggcttcagcctctacttactcttccccgggcccttcccttgcagtggaggacacttcatgagcacggcagagcgcatccggctccccgatgactgcaccattggctacattgtagaggctctgctgggtgtacccctcatccggagcggcctcttccactcccacctagagaacctgcagcaggtgcccaccaccgagcttcatgagcaggtgcgcatgtggcccccaggcctgggtgaccaagcagagaactcaacagttgagggacagaagggagagggtgcctccaaggaagggacaatttttatctatttatttattgattgattgattttggttttctgagacagggtttctctgtgtagctctggttgtccagaactacctttgtagaccaggctggcctcgaactcagggatcaacctgcctctgcctctgagagctggattataggcatactgatacagggcttcactatgtagcccaggctagccttgatcctcttgctgtagccccccatatgctaggaatcagctgtgtgtcaccacacctgattcagagtcgtttaggggtggggtgtatgtatgttttcatttatttatttttttatttacttagagatgggtctcttatagcccaggctagccctgaagttgatatgtagttgagaatgaccttgaattcctgatcctcctgactccactttcctgggctagggttgtaggagtgtactaccacatccagtttatgcagttagttgggctagcccagggtcactgttttaaatagggatatcagagactcctcattctcaggtgtcacagcctgctggtccacatgaggtaccccagtttcactctctagctcctccaaaacagaaagtcaaatagattcttctaagttgctgatcatgccctttgaggggacactcttgctctgtctcccttatggtcgtaggccccaccatgggcttcatccccaggtgggccgagccagtgtccttggctcaagggacagcagcaggaatagccaggcaggactgccacctctccagcatcatcctgttgctcccaatgcaggtgaccctgagctatggcatgtttgagaacaagcggaacgcagtgcacatcaagggaccattctctgtggaagctgacccatccaggtaagaactcgtagagggtcaccaagtacccccggggttgggggggtggcaggaaccccatggttgggactgccagagggcccatggcacccccagcccacgcagaccagtctttactctgtcccaacaggttccgctctgtccattgccacctgtacccagacacaccctggtgtcctcgctccgccatcttctagcagtcgtggttgaaactctgtccctgggcgcccctggtatccaaagggcccagggacctttattgtatgccctggccttggtgtccgaggctcttcagggctatgtgtatgtgtgtgtatgtctatatttgtgtgtttgtgtggcgtgcccacccgtgttgcagactgctgggcagtcgtgttcttcagggagtggcaggtctgtccctaactacactctgagcaccactccgagggcagttgtgtgggatctgtgtttggatctctgcagtgggggtgggtgaggccttggggctccactcaggggtccgtgggtgctgattgtagcagtctcttatgttggggtgctagcacctatctggagccttccctgtcagctgagctgtgcccagtcctagggaagctgatttgggtagtaaaggcctggaccccttgtgagctctggcccgggcgctgcctggtgccattctggtgaacaatgctcccccaccccctgccctccagggtggaggcgaagtcttcagccccaccctctgatgccctatctttgtctcccacaccaagtggggttcagagctatgaattttatctcctctccaaagtagagagaaagtcgcccatagtgggtgtgcctgtacatattgtgacagtatttttttactgtgctctttcttgaaaggggaggggtggnnnnnnnnnnnnnnnnnnnnnnnnnnnnnnnnnnnnnnnnnnnnnnnnnnnnnnnnnnnnccttagtactgtatttatgccttccagtatctggaatcctgctcccccccaaccctccccagcaccccaagacttacctcacccccaccacccccaactcctcactcccctacccctgggctgtattctgtgttctttttgcaaagaccttaactaggcaagctaatgatgataagggaaaagctctcagggaattgatgtgttgttgctatggtgacgtccttcctctgaataaaggtgctctttgcagcaacccaaggggccctagtcttgcttgggagttggggctaagccacctgtccatcaaggtaactcgaggggactttcagatgagggcaggggagacccagtcatgacatagagaagaaggcaattggtaagaattcagcaagttagccgggcatggtggcgcacgcctttaatcccagcactcgggaggcagaggcagggggatttctgagttcgaggccagcctggtctacagagtgagttccaggacagccaggactatatagagaaaccctgtctcgaaaaaccaaaaaaaaaaaaaaaaaaaaaaaaaaaaaaaaaaaaaaaaaaaaaaagaagaagaattcaacaagtttacgacttgggagggaaactagtgttaaaatagatgaagtatggccagcttggtgtagatgtgcctctgatgggttgataccatgttgggaggtgggaattggacagggctgatggcggtagctgcttgatcaggtcatgccctgtgtcaacctcactgtgtccagacctttctggaggaggtgcagtggctagtgggggctggccagagacccattttccagacaggaaaactgaggctcaaagcaggctaaatgaggatgaccaaagtcaggcagccaggctgctgaggtggatgacccccaccccccctagatcttcgttccctgtcaactctgctgacactgcctggcctctcatctgtcatgagatacacctgtcatgtatcctctgaggatgggcagtacccaggctgctcactcgtgggtagagctggcgaggactcggatctttctgaggctcttcagggaccttcctcaaatccagccacagaggctggctgatcgggggatcctcaccacactccttccctgtggtctccttgtttccgctcctttacagagaagcaggctagtgctgcccacctgctgcccttctgtaggtggctgcctgctctgacctgaccccggactcacggggctaggtcctcattacctgccacccctgtgtcctttgccttcttccccacaccatttgattagagatctgtcctgcactccaccagacattgctcacagctgtgggttcagcacccccaagtgggctgggcatggcccttgctggtaactgctcttgccttgtggggtgactggccagagcctgaccccaccttggctttgtagtttggctttttaaggcctgaggcagctgcctgggattttcagagtaggggatccccagtggtggccgtggtccttggcatacagggcctggtggcggtggcttggggccctacttctagatgaggaagctgacatttgtaagggtggaaaggtcacggtggagcagtctgcacacgggccatgagcctccttcctgcctggatgagtcagaggcctgctaccctctgctctggtcgtcaaaagccccttgcagctggcacagagctggcagccacagaggtgtggtacagcggcaccaacctcgccgccggcatggagctgggggccccagccagggtgagcttcccattctgattggagccagagggtggtcctgagcctggagggcagaacctcagcacggagcaggaggggaacccagtgaggtggcataggtctctaacctagtattattcatgaggctgttgaggtaggaggattgtgagggtcgtgagatcagagccagcatgggttaccaagtgaggtcaaaaaaatcatctaagaaacagaagccaagtagggagggcccaggaagggtctagccagtggcttcaacaactcccaggtagagcaggcggaagagtttctcctgaggagggaagcaagctgactgactgactgactgactgactgactgactgactgattgattaattgattttttttcaagacagaatttctctgtgtaggcctgcctggctgtcctggttgatctggaactcagattcacctgcctctgcctcccaagtgccgggattaaaggcgtgcgccaccaatgactggctgcctggccgcctcagtgagggtcttagcgaggagccctcctctctggtcagttactcagtcaggtatcctgtcctggggcttccaaaagtttataaaacgccaggtacactgatgcctcgtgcctgtaaatctcagggatggggaggcagaggcaggaggatcgccaagagttcaaggccagcctaggctacctactgaatgatgctcctcccctcccagctctcaataaaagtaacactgcacaccacgcaagctctagggtgtcagggagggtgcagaagcaggaaggcacccagcttcctctctcgagatgagctgggtctgggagagggtggcagggtagggttgaagctttcaacttccctctctgaacttccctcccctctggggtcagcagggctgacttcctggaagaggtgcctcactgctggagccggaaggccaaaaccacagcgtgtgagcagaagtcagcatgtgtttgtgggtgttcaagcttggcacagcccagacaaatgcaccccagggtggggtttggagggacctggtgaggagaaggctgggaagggcagtgagcaaagccatttcgtctctccctgaggctggacctctgatggtagaagtcagagcccgctgggtggcttcagcctctgttctgggcctcatgaggtctcaagaggaagcagaaggccctgggcagacagcaatttgtcagacccattggcctagcctgtggcacattctcctagggccacctgaccccagccttgacctctcccccaccaaaacaacaaaaaaaatttatcttttcctattcatgctcggcatttaatgtttttaaatttttttttttaagttggggctggagagatggttccatgattgttgctcttgcacagcaaggacccaggttcgattcccagcacccacagggctgcccataactgtctccaatcctaggggatgtaacaccatcctctggcctctacagacaccaagcgtgaatggtgtacatacagacaaacgcctatgcatgtaacttataaaaaaaggttaaaaatattgggggttggcatttgtaaacattttttaaaaagatatataagtacactgtacctgacttcagacacaccagaagagggcgtcagatctcattacaggtggttgtgagccaccatgtggttgctgggagttaaactcaggacctctggaagagcagtcagtgctcttaacctctgagccatctctccaaccttgagaaatggtttttgtgtgtcatgtgcaagttaggtcactagacttaacaatacgtaccttagccatctgcgtcatctcagtggtcttttggcaatttttttttattggtgtatttccactgtacacagtaatttcattaagatagctccatttgtcacatgctttgacctattcatcccctctacctctgtcccctctaggatagtcgtctttctgagatagcccacgtgtactttcatatcacacacatacacacacacacacacacacacacacacacacatccatgagaaccgacaatatggctcagtcagtagagtgcttactaagcatgaaccaagtcctgggttcaaatgagtatcacatgaacatctttggatacatagaatccaaggccagcctggactccatcgtgaaaaataagtaagactggagagagagcttcagtggttaagagcactggctgttcttcctgaggatctgaggttcgaatcccagtggcttagaactggcccgatgccctcttctggcctctgccggtattgcatgcatgtgatgcaaagacatacatgcaggcaaaacactcatacacataaaatattaaaataagtaaaataagagggggggaatgtattaaaactaaccagccttgctttctgtgcaattacatatgtaaatccatggaagggaccctaggaccaagaggcaccccatattgaaggttgcttaggtattgtcaagagtttagaggtcccatcaaggcatcatccacttccaccacaacccaccatggtccttggctgccgcctggtggccacagttgataacttcccaccctgggactcccagtgtgagtgccagctttccagagaccctcccccagatctagggctacaaccaggaagaactgcaggcctttgctttggcgtaagttccatgtgatactaaatatattcccttctgatttattggtctttctcccttagtagtgctgaaaatagagccatgggtctcgcatatgttaggtgaatgctcaaagtcctgaatacatccctggccttctaatgtctgatttatgcaataagggagtcaagtagaaggctcatgtgctgtctcgggctgcctatcagtgtggctcaagccgcaggtgccagcacaagcattctcagcagaactaccatccactttcctcctcaacataaacctctgggcattgtggattcagactggcaagtactctcctgatggggggaccagtgcctcctgctggaccctcgcctcccttgaaccttgtttcagctttcacatacagctccctcactgggggcctctaggtaggaccactgagccacactctagcccatcactgggggattctaggcaggggctctcccacttagccacgcctccagagcctccctggggaattctaggcagggctctaccactcaggggctctaccactgagccacagccccagcccctccctggagccatgctttagtacagagctttctgattggtccttggcttctatacgtccttcatcccttcctgactcagcagctagagcaattcagtcgaaatgaatactagatagtgtcactctacggctccttcccagccaattgctcccacagacctcattcagcaaccctgtgtccctagcctgagctactctgtgtacagtgttcatgatgagaatgagagagagagagagagagagagagagagagagagagagagagagagagagagagagctgtttcttaaaattgtttattttaaaacatgaaacccaagctgaatagagaccacagaaattacatggacaagaactttagttatttgccaagaaaaataaagttccccacagaaataaaaatcaaaccccaaacccagtttaaaaaatgaaagcacagcaacagtaacacacagccatggccctacagaggctggaggggaacttggggctggctcgattcagatgacatagtccactgggggcagatgcaggcagagggaccgtaactgggaggcaatctcacaaaatcacatatgggaggaagggtgcggcacaccaccgctgtgatgaaaaacaaagagaccctggtcacctgtggcccaccagctagccaccttctgggccggacagagctgggaccgggtagggcaagctttggagctggggtcaagaattgcatagtgatattgggggggnnnnnnnnnnnnnnnnnnnngcttgaaggatgctccaggccgggatcttctgctactcacataaaccagagagtgttggttggggtgggggcctccagtcctatcagttttctcagccagatccctcctcctggctcggcaagggatcgggctctggtttggtggcttagccctccttgttacccaccagagctgtagggtccccttgggtaatagggactggggaccaatcacaggcagctggcactggactgctcactccctggggatgtgggggtggaccactgggattgagtaggtaagtggcaccccagaaatcaggaaaacgaaatgaagccaaccgcagtggtaggagccgtctcctccgcaggggtcagggcgagaaacccctgctttcatttcccctgcttcctttcttcagcctcggtgagtgaaacgtcacagatgggggcactcacgcacagaaggtcaggactcccgagacagcacaagttcacagccacgtccgggcagtgcccgcctctcatgctatatacattcaccttgtggcctgctcacggccagggggcagcatttgtgcttctgagaggccccagggcacacccaggcacccaggcagggataccccaaacctccctccggaccttaggccaggaacatacccatagtgggcaggctggctgcagctgggctgctctggccctggaggttcctggcgccaggccagttggagtcaaggccagggtcccctgcactgatgttgtcgtgcttaggagctacagatgccccgactgggacccctaggccctccgagtcctctgcccactccttttggtcccagacaccagcacaaagaaagggattttggggaaggaaagcaacgtggagcctctcccctctgggggagctgaagcccagggggttctgggatccgtagctgccaggttgctccaggagggccacaggtctgtaaaccactgggtcccagccttgcccctcccaccacatgctgctccactggcccgtagctgcccatctcacagaccagagctcacactggctggctgggccagggtagaggctccaggtcctgatttggaagctaattcagcccagaagcacagcaaacatcacacactaaagccaaaagcaccttaggcaagcggtgttctgggtgtggggggctgaggccacatggacttcagtccccggaccccaggacatgctcctcctggggcagcacctgcctggggaggggtctctaggccctttgagtagcctgtgggtctggcccctccctggcagcaccccacaaagaaatgaccactctagccctggctccaggctagacttagggtcacgcttgctggctcagggtcagccaggagtgcccatggcagctgagagtgaggttagtggttagtcccagcggggggtggggggggccttctgaggctgggggcacattcacagccgtcacaggtccagcccccaaggctgggctccagagggcactgccgcttgtcctgggtgagaatgaaaccgagaggaaagtgggcagtgtcctgcgtcgcctatgtcccagactgccctggagatgacaagtgtggtcagtgcaaaaacaaaggggaagacaaagctgccactcttcaggaatgaatgggaaagagggtttggcaccaagaaggtggccagcactgagaggccagggagtgacctgggctcagcttggcacctgctgtctggggagggctggctgggcactgagggaagagtcatgtggggaggaggtgtaagaagagccccaccctagaggcagctcagaaccaacaggaagagccaagtaagccaggtggctaagggaaggcaggcgccggacgttgcaaagaccagagagtatgaaggggccgttcggtgatgagcaggtgggcgccaggcacagggtcccctgcctgtgaatggagatgggattctcaggagtgtggcggtagggcagtaccaggaaaggctcgctgtagctgtggggagggggacgcccagagtgcaaggggcagcatgaagggtcacctgtagaaggaacgcaggcagggtggaagcacccggcacagagcagggctcagggagcccaagaggacagaagggcaggggagacggaggcaggcagggtcaggttgctggtggcagcgactgtccaggtgagcaccccagaagcctcacttcacaggctggcccggagctcatgctgggcacctccatgcctcctgcagggtgggtatagcgggggggccttcaggtgtgcctagggctggcccggtgtggcttgtggaaggtccagcagggcggaagcagcggtgctggcataggaagggtggggcattggcacgtgggggcagatggctggccggtgtgcggtctagtgcccgctgccgctggagtcggggcgaggctggctcgtggcgaggtatttggctctcatgctggaggtgtactagaggagagagggaaggagggagcagggtcaggtgagttcctaggtgggggctgagcagccagcagcctctttgatgtggtccttggtagggtgagccacagccgacccttggggagagcatggttggcggaatcctaaggtaagaggccactggcccagggctggaccaagggctgagtacaggttagggaagtgatggtacctagagtacaaaggtcagcctctgtagctgaggctggatcacccaggcaagttcccttcccagtgaaggacacccagtccccttctgtcgctaaatcactttcagagtcccagtcagatctttgccacctccagtaattcagctcaaaggctctgaatgcatcacacacgctgagcacaggaaggccacatggaccccatctctatacctctgcctcagagctgtgctggggtcagggcaagggctcccagggcaggcccacaggaagctaggccacagaccacaactgctgagtccactggagcctcctcccctgccattcgactccatcacccccaggaaatgggggcccttcaggctagagtgactctggcccagcccttggatgggaaaactaactaaaggatgtgtgactcgggatagaggtgactgccccattctgcaggtggcctatacaccttggccgccttaacaacagcaccacaggctccaaggtttgggcagtgtgtccacgtgcacgcatatgcacaagcacaagtgtgtgtgtgtgtgtgtgtgtgtgtgtgtgtgtgtgtgtgtgtgtctggctgtctgcctgcttgcctgcctgcctgcagaggaacatgcctccaatcatgtgccaaggccaggtagtgagtgtgcaagagtttgcatgcctgaggcagggacaaaggtcaccagcactcagaagaccaggcaggtggatccccactcaccccaccccagggagcacaggctggctccatagttccccgatgagagacaatgctttctcccagggtcctgagtgctttcctgagacattct

SEQ ID NO: 265 - DNA, 1192 bp, Mus musculus
ttggcactgggatagatattacgtgcggccgccggccaccatgctccagcggtgcggccggcgcctgctgctggcgctggtgggcgcgctgttggcttgtctcctggtgctcacggccgacccgccaccgactccgatgcccgctgagcgcggacggcgcgcgctgcgtagcctggcgggctcctctggaggagctccggcttcagggtccagggcggctgtggatcccggagtcctcacccgcgaggtgcatagcctctccgagtacttcagtctactcacccgcgcgcgcagagacgcggatccaccgcccggggtcgcttctcgccagggcgacggccatccgcgtccccccgccgaagttctgtcccctcgcgacgtcttcatcgccgtcaagaccaccagaaagtttcaccgcgcgcggctcgatctgctgttcgagacctggatctcgcgccacaaggagatgacgttcatcttcactgatggggaggacgaagctctggccaagctcacaggcaatgtggtgctcaccaactgctcctcggcccacagccgccaggctctgtcctgcaagatggctgtggagtatgaccgattcattgagtctgggaagaagtggttctgccacgtggatgatgacaactacgtcaacctccgggcgctgctgcggctcctggccagctatccccacacccaagacgtgtacatcggcaagcccagcctggacaggcccatccaggccacagaacggatcagcgagcacaaagtgagacctgtccacttttggtttgccaccggaggagctggcttctgcatcagccgagggctggccctaaagatgggcccatgggccagtggaggacacttcatgagcacggcagagcgcatccggctccccgatgactgcaccattggctacattgtagaggctctgctgggtgtacccctcatccggagcggcctcttccactcccacctagagaacctgcagcaggtgcccaccaccgagcttcatgagcaggtgaccctgagctatggcatgtttgagaacaagcggaacgcagtgcacatcaagggaccattctctgtggaagctgacccatccaggttccgctctgtccattgccacctgtacccagacacaccctggtgtcctcgctccgccatcttctagcagtcgtggttgaaa

SEQ ID NO: 266 - protein, 389 aa, Mus musculus
WHWDRYYVRPPATMLQRCGRRLLLALVGALLACLLVLTADPPPTPMPAERGRRALRSLAGSSGGAPASGSRAAVDPGVLTREVHSLSEYFSLLTRARRDADPPPGVASRQGDGHPRPPAEVLSPRDVFIAVKTTRKFHRARLDLLFETWISRHKEMTFIFTDGEDEAKLTGNVVLTNCSSAHSRQALSCKMAVEYDRFIESGKKWFCHVDDDNYVNLRALLRLLASYPHTQDVYIGKPSLDRPIQATERISEHKVRPVHFWFATGGAGFCISRGLALKMGPWASGGHFMSTAERIRLPDDCTIGYIVEALLGVPLIRSGLFHSHLENLQQVPTTELHEQVTLSYGMFENKRNAVHIKGPFSVEADPSRFRSVHCHLYPDTPWCPRSAIF

SEQ ID NO: 267 - DNA, 30624 bp, Homo sapiens
gcacgatcacaggcccctctcgcgctccgaggcatgtgccggccggcatgcatcctgccagggaatctgcgtctctgtcggtgacatactccgtttcctgccacagccctggtatgccccaggagtaattactaacagagttccctcccagccttgaaagacgatatactatgtggtcacctctgtctgggccaccaagaggatcccagctgggcttttgctgagcggggcacaaaagccatcaggagccagtcttggggactacagctgggggtcggtgaccttgatcaggcccagggaggctgagaggagtctcgcccacgctgcacccacagccccgctcattccacacctgagtcttcagagaaggaaatgcaagaccgtgcagttaggacctggaattgtcagcctgtccccatcctgccagcggggattggcctgtggttttgtcagctgccagccagcggctgaggaccagccctgcaatctgagtgggggcctgtgggaggatgcagctgaggggagtggcgaagctgaagaaactctcgagaaaggtgggaggggccggggcagtgtcagggccgctgtgcacatccgtgcaggtcgtgcactgactggcagcacacatctgagatccagcccgtgctccgctcatcgggttgtgaagaagcagtacctctttccaagcagtggcccaggcagtaagcggagcatctggcaggcggggtccacacttccccaagaccctgtgctggctgtggctgtatgtgcacacttctacatgacttgcagggtgcccaaacggcccggaggaggccgggaccccagcccccaggccagggctcccgtgagtagggagacgcatcactctctggccccggaggctgtgcttcccaggccatcacaatggccacacaacaggggccctcagggacggaacctaatcttgagctattgaagacctgaaagccgtggcccctggcccgagccagcagacgcgcctgccggccccaccagagacacctgatccaccggtcgccccgccacaaagggggacactgtccccccagggccgcccgccccaccaacagagacaaggaggaaaactgggtcgctgagatagagtgacagccatggcaggtggggatgagacaggagggaggggcggccaccactgggcacagcccagcctctggggatgccccaggcctgaagatctgcccgaggggggctcagagccccgaggagggctcaagtgactgccggtttgcagggagtggggtggaggctggagtggggggcgcagctgagaccagaaagaaacagctaggaccccacctgaggctggagacacagccaggacaggggactctccacccagagagacgccataggccaggttgttggggacaggcctggactggtccccaggccccaccctgctgaggcaggccagccagctgcccaccccttggcctgggcatgtccagcttttgctcagtttcccagcctggcagggctttccgaggggttgcagggagaagcaggcctggccaaaagaccgccatgcctgaaggttcaccttcaccccctggcaccaccaaagaccccgcccaggggaagtcttggagcctcagcgcctcagaactttgggacttcctggcatatgggaggcacccggaggtgtgagcctgaggggttcactttcaagggtggctggagacacctgctgctggccatgtgggcctgggaggccttctggggcctccatcttcccatctgtgaaatgggacttggacctagatgctcttcaaggtcccttcttccaagtcttctggcaagagccaagtccaggaagctcagctccattccgtcggcatctggactgagtactctgtgggtgccgggctgtgctgagggctggacgggacccaggaacagacaacaggtagagtggaggagggagcagcgaggagacttcccacaggggtggagacgctgagcactccaggcagacacagaggggcggctggagtgtggggatcctgggcctggcagggcctggggggttcggcaggcagagtgggccagggggtggcctgaggacgccaggggcagagccagccctcccaactgggcagtggggagccaagggagggtggcagagccgagccccatctctaagatatggggacagccctcagagccagctcccacccagctccagctcaggacaagcagtgggcatggaactgagatgcaggaaggccgaggtctggagacgcacgtgggctccccgaggtgacctaggggtgggcggccctcagccctgcccggagatccctggtcctactgagtcagccaccggggagaagataagggaccgccaggctcttaaggggcctgacgttgctgttgggtgaagtgcccgcccagaatgacctcagaggctgccggggccacctggcatatcaccctgcccgtctccgcagcttcctctggcagtgggtggatgtataatgtccgcccactgccagagggttcacggcaccacagccctgctgagccctgctgagccccagctgggtccgacctcctgggtaccccagggacggggaggccaggcacgggggttgctgtgcgggttggacagtggtgatggtggacagagccactcccaagagtgttagagacctggggtgggggcatccaggcagaccaccctcaccccaccctgtgggacccagaccagctcacttccctctctgggctcagcttcctcatttgcaaaatgaggccaagagtcacacccggcccggcctgtgaccccggagccccctccagcctcctgcctcactctggcaccaggcctccctgcagcttgcagagcaagcggggtaccgtctccccgaggtgcagcctggggggctgtggcaggtgatgggagcagctgtatttgagggcagggtctgtcggggagccccccagcgtggggagaggaggagggaccagggagtgtaacctggcagcccgcagcagttccggctgctgcttctgtcaatacggccttcctgttttggagattaaaccccggctgagcaaacagctttccaggcggcccctccctccaccccagccccagccttgtcttcaggtcctaaggctgggaccacctggaggctgtgggggtggtgggggatggaggggaccaagctttgccatccctgccctcaccaaggcctggaccacagcctgagcagcccagcccctgcccctgccgcagcctcctcccagccccccgccgtgggctcccccggaacccccccgtgcgatccttccaacccagggcagcctcactgtcctggacgcccggccactgcatcctctgcccttgtgtgacctcctgcaagaaggcgggagcacgccgttcccgggcctcatggccagacacaagcccaccttgtgaggaccccaggcgaggcaggagagccaccgcaagagccccaccaaggcacggccaggggagggcccgccatctcttggatggtttctgcgccgtggccactgacattgagggtggatcattcttggttgtggggctgttctgtgcatggggggctgtggggcagcctctctgggccctataggccagaccctactgtctgttcagccccagcccggtggcgacaaatgaaagtgtctccaaacattcactgtcaggtgtccccagaaaccaagacgagcactggataaccccgtctgggcaagtccctagcagatggcgtgcacagaaacgggctgcagagagaggacggtgcctccaatgcttggactttcctctgatgccagcctcagcccagcctctgccgccctgagagagactctgccccacctccccacacccgcctccaccatcccctcctgccagggtcccacccctgagcaacacggccctgccttctctctgcaaatccttcccagactaagctgcaacactggcagagcctcccaaggaagggaggagggaggacagaggccaaggcggctcctggccaccctcgcagcttcctccctccctggccacaaggacccaaagctcagagggatggatgaacagacaggaaggctcaggctggacacgtattgtatgaggtgggcctcagggttgcttttcctcctagaatgccactcagagccgtccctcttgctcgtgaacctggagccccctatgtctcccccagtacccctgcattctacacctagatcctcaggcttctctttatctccagcctcacctccatgaatgccccacacacctgtgcctgaccacacaacctccacctccacctgctcccacacccctgcccaacttccacctccacctgcttcacacacccctgcctgactgcacaacctccacctccacctgcccaagccttcaagccccagggcaaatgtcaccatcttttcctggaagactttccagaagtcccctgcctcccagccccagcccacagtgggttctccctcgtctgggccctgggcacctttgggctggacccatttttctaacccctgttgaatcctcacctactaccttcccccagtgccaagcagatctgggcatggagcaaatgctcaggaaggctgtgggatgagcacatgaaatggatggaaggatggacggacagatggacagatggatggatggatggatggatggatgagtggagcccaacaccagctctcaggtcctacggaggtggcctctctcagcaggtgtgatcgccattcctggggacataacctccccttcttctgcttccagagcagcctggaatatcctttgatgctgtatcgtcttccctgatcctttcaagggggaaagatggcccatggtagcgatggggagcctgggatcagggaggtacacaagcccaggatcacatagcaagcagggctcccctggggccaagactgacccctgctccctccacccggcctggagcccctcctcccactgctctgtatcccatcccactgacatgggcacggggtcatgactagggtggggggtcatgcctggggcctgacaggcaacaccgtggccacagcccaccccctgcctgctgtggctgccacacaagccagccattcttggcaagacaaaggccggctggggcagggtggctctggtgcctccctggtgggtgtctggactctgcaggacgtcagtaagtggatcctggtggctgcgctctgatgctgggggctgcaaatcagattagccccatccagccccatggcccagctggcctcagacagaagcgccagaaagaggcgcagctgccagcccaggcctgccgtcctcctggtgtggacaagccctggcctccaggctgaggccccttgctgttcctgctgtgggcttaagggtgtgccacctcttctttctggccccctggacccgtctgtaagaccaacagttagagtgagaccccctgaggccttctggaggtggtgtttggaaatgcccccagggcagggcaggcacatagtgcctaggcactgggaattcaccttcagcacagccctcccccaggccccaggccctgtgcgggctcagaggccagcggcagccctgccaggtcttctcaccctgagacctatgctccccagggctgggcatttgggagacagagtcagagaggcgcctttgagccctctgtgtatctgcacatccacccatccatccttccatccaacctctaccaaccaatgttcatcaagcacctgatacacacaggcactgctctaggccctggggcacagccaagaatcacatcacggtcctgctgtcaagcagctgacatccagcaccctcccagccacccgcatgcctctgtgtctatgtgtctgtccatctatccattagaccatctgttggtccatctgtccattcacctgtccatccatccatccatccatccacccatccatctgtccatccatccatccatctatccatccatccattcatccatccatctgtccatccattcatctgtctatccatccatccattcatccatgcatccatccatccgttagtctgtctgtcctttcacctatccttccagccatccatacatccatctatccatctgtccattcacctgtccatccatccatccattcatccatccatgcatccatctgtccattcatccatgcatccatccatccattcatctgtcggtctgtctgtccatccatccatccatccatccatccatccattcatctgtctatccatccatccattcatccatgcatccatccatccattcgtctgtctgtccattcacctatccttccatccatccatgtatctatccattcatccatctatccatctgtccatccatccatccgtccgtccatccatctgtccattcatctgtctatccatccatccatccatccatccatctgtccatccatccatccatctgtccatccgtccatccatccatccatctgtctgtctgtctgcccatccatctgcccctccatctaactgttcatccatccacctttccatccatccatctattcatccatccatccatccgtccctccatctgtccatctgtctatccattcattcatccatccaaccatccatccatctgccaatctatctgtccatctgtccatccatctgtatgtccattccccccaccatcagttcaaccagtgtttactgagcacctactttgtgccaggccctgacaagcagcaagaggcagcctcttcccccagggacacagacgtaaaggagcagctacaacctcatgtgatcagcaccaggatgggggtagcagagggggatggggaggacgttctaggaggggtagcccttggtgggccctgcagggtgcctcaggccaggatgccccccgaagccttgctcagccactgaggccaagtcggctgaactctaatgggcctggcctctctgtccatgcctgaccccagagtgcaggcaaaagggccaggccactgttggaaaggccgtggcttcacggctgcagagcaccaaccccaaggcagcctggtgggcagggcgggtgaggcaccagccatatccctattacagagtcaagtaacgtcccaagacccacagaagggcactggcccaagaccacacagtgggcgaggggtctgggcatagcaggcaggcagggttgggaatggtgggggtgctactcacagctggagtctgctagtctcagggcagtgcccactccagctgcagtaatgggaatcagctgtgccaccctgcggtatccctcccccggccttgggagccggctgtgctgagcccagccaaccttcccatcaccctccttcctgccaccaagggctgctcacagaagctcctgggtcgggacactcactaggccacgcctgccttttggaaatccatgggccccctggcatctgggggcttcaaacactgccagttctgatgcctggccccagcctgggggttggcattcctgcgtctgtgtcaggagaggacagggaggtgcaggcttgcccgagccacagccaccaccatgctgagtcctgtccaggagtttccatctctgggcactgctactggcccagaggaagctggttcccaagacactgagtggggccgctctccatcagccgatgagtggacaggcgcctcggatggcttcctgccgagttaatgggtcacccattatgtctccacagatcttcccaggaccctgcaggaaggcaggccagagcagccccaaggaacagcccgggggagggaaggcagatggccacctcaaagccagccccgagcccttcccctctaggcctgagtgtcaagggcagacccagcccatggctttggggacctggtggcactgactccagcaggagaccccccgggctgagccctggcagttagaggaggcctggactcagatggggacagaacactgtctcagcctgatggcggctagaggaggagggtagggcccctggtcatgtgggtcctggctccgtgggcctgctttccacctgacctcagcaggcaggtctctcgggccattcgcacacccagctgcctgggagccccaaactgggactggtggaggggccctgcagaggggaagactagggtccaagaagcccatgaagccatgcgccagggccagagctggcctgcctggtctggatggtatgtcatccttgtgttacaagtgaggaaactgaggctcagggagtaacaccaccggttcaaggtcttaaagccgagaagtggcccctctgggttcggaaggcaggctgggccctggggcagcctctatccccagcccctcttccccaggaccctacggccccaagaggcttcactggcaactcggtcagccctctctagccccctccccagctcccctttgtcctgtccagggctgagcaccatcccacagcccacttccctaccagggctgtgtggcccagtgggcccctagagggagacctggggtctggatggggagggaagtgtttcaggctgaagctgagcctggggaagcgggcgggggtggctaggcgggccaccccctcaacagttttcagacctcaagaagtcaccacgaaattccattctcctgacagcaaagaaattgattcactcttgccaaagcctgcggcccccacaagaatgctgtaaagcttcctcccgctgcttccagacaggcagcagcatcaggtcccccactcctcccattcctggctacagagagacgcgggaaccccccctacccagttctatgcatgtgcccctgccaggctgggccatccacctctgtatggtcactcccttggtacaatatcccccttgctttctctacaatgggcacattgctcccacgacctgctgggtcaaaggcaccgcagtcaggggtagctggggagcaggagttgcgggggtggggcggctcagggcaggaagccccatcccctggcctgggaactgtggggagatggactcacagcatcttgtcaggtggggtgcagggtggcatggcacccaccatcggtgccactgatgtaaagtccaggtacagagcacaacccgtgcacatatttgggggcttggccatgcttggctgcaggggattgaggagggattgggcctcaagaaacggggctgggactaagtcacgaggtgcgtgaatatcaggcgggactttaactcagccagtggagagctatggagggttttgctctttgtgtgggtgtgtgagtggctatgatcctagttgtccagctgctgcgtggagaataagtaaagcaggtaggataggagtgggtgggatgggggtggaggctgcccaagtgattcagggaagagatgatggggatggatgaggctccgtctctgaaacaattcagatatgggagagcctgaagtcagcggtgtgactgaagcacgtggggtcatggacacccctcagtccggaggctggggctgggctgggactcagctgactttgtgggggcagccaacccagtcactgggtccttttctccccggctcaccctcaagcctctccagctgcatggaggctccagggctaggctctggctgatcggaaggggtttatggcaggaggtgacgccatgggagacttgtcacttgggcacagccagcaccatctgctggggcatctgctttcggaggtggtgactgctaattacctggggccaggaagaggcctgggaacccccatcccccacaccacccagcgggtacaggggctaggggtggggcccctggggccctaagagcaaatgggctacagcgtccttagcggggggagagggtctgacagtggggccagacatttatccagtgaattttttcagagcacctactatgtcccaaaacctgttccaggtctgaatgacaccaggtcgctgctgtcttgcggctgacattcaggtagaggtaaggagaggggctccaagggcacttaaagaatttaaaatgccatctcaggcgtgaacataactccgaggggggcagtttagccacggtggtggcggtggtggtcgtggtggtcgcagagaccctgcttaggagggcacgggaagacagcgcagccacgggcagagccgcctccgtccacgcttccggaggacgtggcgggcagggggctcacaccctgctcaggcgacccttggccacttccgggcccctcgcccctcaccctcggctgccggcgcgcattcctgccgcccccgctcgtgcgaggggcgggcccgggcccgtgggaagggccggggatgggggccgtgtgccggggaggcggggtggggagggcgcacagctgggccgcatctggcccgagcgcaaggagaccaaatgggacagaaggcggcctttcatccggcgagggaagtggcggccttcgtttctcctcgccatggggcgcctgaggatttcggggagccaaccctcccgacggagggccaggatcgaggaaatcagccagggaggaaggagtggaatttggttctggtgctttctcgttagaacctcgtgtccccacctgcggcacaggtggccaagctcttgctctgtacaaataacggctcccctgaaccgagcgctcgggaagacccaggcgccaccccagtttgcaaggcctgccgcgtcccaaggggaggaagccgtgctcaggaggggaagcgcacagcgaggaagtaggatgtcccccgcggtgcgtcggagcccagagcccgggtctcagcaccctgcccgctgcgccgagggcgcgcccctcccgtgccgggacgcccggtgcatccccggacggcgctggccaggctgggtttcctcttcagggacaccggcgcgggccgggcccgtccccaagcccctcggcggcccgcaggggctacccggggcggggggggtgcggggcgtgcacgtgcgcgccgggggcggggccgctgcgccctctgggcagttcccagcccccagccgcggccccacgtgggtctgcgggcgtggagcggcgaccggcgcgaggccccgcccccgagcccgggagccaatgagcgcacgggggcgggaccggggcggggaggtttaagagcgcgggacactggtgctgcgctgctggactgcgccgccggagcgacgggcttcgggtcggtgcaaggcaggcgcacggggaagggcgcgccgcgcggccgccaccccaccatgctcaagcgctgcggccggcgcctgctgctggcgctggcgggcgcgctgctcgcctgcctgctggtgctcaccgccgacccgccgccgcctccactgcccgccgagcgcggccggcgcgcgctgcgcagcctggcgggccccgcgggggctgccccggcgcccgggctgggggcggcggcggcggcgcccggggcgctggtccgcgacgtgcacagtctgtccgagtacttcagcctgctcacccgcgcgcgcagagatgcgggcccgccgcccggggctgccccccgccccgccgacggccacccgcgccccctggccgagccgctcgcgccccgagacgtcttcatcgctgtcaagaccaccaaaaagttccaccgcgcgcgcctcgacctgctgctggagacctggatctcgcgccacaaggagatggtgagccccccgcggcctggactggcgggcgagcggggcggggacccaccatctggtccagctggtggcagtgtcccatgggagtcaggctgcatccccatccagccactagggccatctgtgggcgacgccagtgcaccccggtgcacccagtttgcctgctggggccactctcccgttacagttgtgttactgtccccggggccccgcctcctgtccagctccagagtcctggatggctgcaggaccctacaccagtctccagtgcttggggttggtgccctgtgatacttctcaccccgtaaacattggagcgcattcatagggcattatgtcctcaaacttccacaagcaaattctgttcggacccaccctcagctcagaccccttcctggggagaaaggctcttcctttagagaagtgaggggttctgacctctgggccctttcctcatcacagtgttaaggtacggggagggagggaagtcattgctggttggtgggtcctggggagtacatctcaaagaactccaggttttggggtctgtgtggggaccctccccgcacagtgcagtagtctctgaggcctgcaaccttgggcacagcccacttcagttgggcatcagcttcttacacacacataattaagacacaccccactttgaacatttccctcgaggccacagcaggacggttgggctggggcgggatggggacagtgtgtggggcttgcagtcggggactgggggggtgtctctgggctgggagatgcagaggcatttgctgtgagggtgggggctcagggaagaccctgcacgccttcctccctgctcaaaccccggagacccagggccttctgacctggcgctgtcctgttttggggcactgtgggtgggtgggagcagggcttggtgaggtcatgagggcgacggggaggggcagggtcctccctggtcctggcgtggggaaggggccctgggaaccccatggcagcctcctgggaacacagcgtcccattcccaggggctcagcgggctggcgggagggggcggcgggggccgtgggttttgtttggcggccgggccgttaggattcccagcgccgggcggctctcacgccggccccttgggcaaggtaacaaagcccctttctccagcgagaaaggcgtcgggccccttgtgtgcagctacgcgctccgtgggaaccgctgctggcgtgctggccactcaggttgcctggcgatgaggggaccagcgggcccccccagcatctcttactgacagtccttttggggcaccatccctgagcctggcccccccacccccagcactcaagccttactgctatgtgatcttgggcatccttcagccccactctgggctaccaccagctctgagcacctctcatcttggaatttggggcctttctccaacagaggggatgtggtcagagggctgggctgtgtgatcctgagcaagacctggggcctctcagaccctcactctgatctctgaaatgggggaacatggtccttccaggagcacgttgtaagagactggcaaagcctgcaggcatggggtgaacccggcgggcactcagggtcgaggtgggggccatcactcccttgagccctgaggtccctactggagggtcaccccaccaggggacaggttgaatctgccctcagcatcagttcaccagcacacagcaagcaaagacccccttgtggtgggtgatgggcaggggtcctggaaacccacagaagagggcccccctctcccagccctgcacggaatgactcagacatggtctgatgggggagatagaaagatgtcagggctgtgcggggggaaaaccccgagaggctgtgtgaggcaacagtgggcatctgacccacatgctgggggaagggagggaggagggaagacttcctggaggaggcgccatttgagctagactaagagtaaaaaagtgcccagaaagggcactccatccgggcatggtgatgaccacagcatgggggttgtgcaggaaacttctagcaactggagtggtggctggggggagggtcggttggtcagcaggggccgcgctgagatgggcctggagtccaggatgaagagcctggcctttggcccagaggttccccgcccctcccaggagcagccaggctgccgcgctgccaccacagcggccacaattgctggggagaacttggcatcctgtgtttctttgaatcgcggctccaggaacaatgctgcttcctgtgggtgtcccccggcccccgcccccgtccaccctcatccacccggctcttcctcctgcagccccgtcttcgtctggaaagttaggtggcactggggggtctgggtccctagaaggcagggactgggctggtctagcaccgcctcggccccagggtatgacctcaggctggtgcctgcacctctctgggcctcagtttccccacttgggcctcagctggtaatggcacccacctccgagggctgtcagggagaggaagggagagaatctgtctttgcactttgttctctgcccaggggagctctgttatgcccattttactgaagacgagactgaggctctgagcggcaggtgaggcctatagcccagcagcgcctttttcctcccctcctggtggctcaggtgtcgggagacagttcgaccggcacccccgcaccccatagccccgccttctcagatgctgttctagaggcctccctgctccctgagctgaacaaaggtgactttaatctccgtagccttgggctgggtttttagggcaccaccaaatctcgggagaacaggcctcccttgatctcattaagaaagcattttccttttaacccagcggcgcagtggagcgtctgcaggggctggccctccgcctcccacggcattcctgggctgagattctggggaggccaaggggctgggtgcgagtctgtgcgtgtggctgccctggggtgtctatgggtgctgcaggaggggtgcatgcatggagaggcggagacccagcctgccacccccttagctctgggcctcaccctagtgagcatgtgcccagggctgggtcaggctggataaggatctgagactaccaaggtgttccagggcctctgcgggacctgtgtgtacagggaaggaaactgaggctgggtgggcatcagggggttgtcccttggtcagagcattgcccgtacaccctgggttttgcactcagccatgccagggtgcgccgggcggcacgcgctgggcgggccgggcagaggaaggaacattcctccccgtgtgccggcaggcccaggcgggcgccggcgactcctggccccgccctggcggccccctcctcttccgcagagcgctcctggcagggggcggccgcgtgctggcacaggtgggctgtggccttgggcaagcctgggtttccttgcctgagcagtgggaggggtgctgggctgcatgggtactgggggcccctgacctgggggctggggacacctgaggtttcctgccacaaccctgctgaccgttggcaactttgcagaacttcagggctgctttggctcagagtgggtagcttgtcctgcaggtcacccaggacaggggtgctggcccaaagggcagctgtggggtggctgcagtgctggtggctgcaccctacgcgcgggacctcatgcccagcctggcccggttaaccaggccagctgtatggtaatgggcggcgcggccactctgcttaactcggccgagttaaggccggcccggcgcccctctcccgccagcccaggacaaagctggcggacaatgcctggtgattcatcctccctccaggccctttgtccgccagggcttggcagccgcccagcgaaggcctttgtccccaaccccgagtgattgagacttggcttcccacagccgacctcctccgcctgtccctcccgccaccccgcctgtcccccgcctttccagcagcctccaagtggcaggctgggtgctgtgtcaataagggtgtgtgccctgccaggtgcacggggcgggtcgggaaccggttacctggcgggcgggcgaggcgcaccacctggctcgtacctcaccgcgcctggacgaccttgggtgcagctgtcgaggttggggagtgaggcccccatcccccacccccagggcgagtgaatgcgtgagctctggcccagatggcactgagatggggcacttgagcccttctcagcacgagtggggaaaccaaggcccggagaagggtgggtgtcagtgtgacgcagctgcagctgcagcaactccagggcgccccgtccggcccccacagatggccctggggtggggatgaagggctgcctgctgaaggccgattttctccttccagacgttcatcttcactgacggggaagatgaggccctggccaggcacacgggtgagccctggacttggggcgggagggggcccaggcctccatccagagccgaacgctccccctccagtctccctgcccctctgggccgagaggtcaccaagggcaggacagggagggcagtttactcatggggtttgctccatgccccgccccaccactcgggccccccaattctcatgcaaatgaagcccattcagccccccgggtccctttgagcccaggcagcggcaacaggtggcgggtgctgggaaaaagctgcctgaatgggcgggggcggggccgccctggaaggggctgggctgcgggagggtccacaggcccaagccccgagctagggtgggggaggctacggccgccgggcccagcttgaactagggggcttttctcgagcccctgggccctgtggcgtcccccaggccaggcccctctctgggagccggctcagacctactcacagccgctcccctgtccacaggcaacgtggtcatcacaaactgctcggccgcccacagccgccaggcgctgtcctgcaagatggccgtggagtatgaccgcttcatcgagtccggcaggaagtgagtgtggccccgggggacccccatctccctgcccgagcctggcagcgcccgccccggcatgccctcccccgatggccctgccttgtcctcaggtggttctgccacgtggacgatgacaactacgtcaacctgcgggccctgctgcggctgctggccagctacccgcacacgcgggacgtctacgtcggcaagcccagcctggacaggcccatccaggccatggagcgggtcagcgagaacaaggtggtgagtgcctgcccctcccagtcccccacgcccacgcggagcgcacacccggagtgggggtgggacagtgaggggcagcagcgcctgggtctcaggacaccttctcccttctcccagcgtcctgtccacttctggtttgccacgggcggcgctggcttctgcatcagccgtgggctggctctgaagatgagcccgtgggccaggtgagtgccctgcacaggttaggccagcccggtcccaggctcctcgccactgtggggcctggcttagttcatcttcccagccatggggtgtccccagcctcctgtgtggcactgcccacttacttcctatattccacttccctctgggtttcagagggcagctgtgtttacggcggctgcccccaagcctgacctgctcagagcagccaggggggcgatgagcaccccaggcaccatccggcaggactcttccctgcacccagattccctccacagagagccacggagcacaggagctgtgcagggagtgtgccctggctgtggccaggggaggcagagggagctgcagcccagagctctcctcagggctcctctccctgaggagtgcagcgcctttgcctggtggggcctccccagctcccagcagatggctcccgcctctgctcactggtctgggcccttccctcccgcagcgggggtcacttcatgaatacggctgagcggatccggctgcctgatgactgcaccatcggctacatcgtggaggccctgctgggtgtgcccctcatccgcagcggcctcttccactcccacctggagaacctgcagcaggtgcccacctcagagctccacgagcaggtgcaccatcctccgggccccgccaggactccgagagcacaggaagggacgtgtggctgccgagaggggcgcagtggggtggggcactgttctaaacagggaggccaggcagcactccactgtcagccagggggggtcactcctgccatgagctcaaagctgtttatggcgggttgttttcctgccgtctcttctcttcactgtgatgcgcctactgtgcgtattttgtccacgctggcaatgcagccagccccagctggtccccagtttgggaccttattcctggggtgtgcagggcaggtgtccttccaggtccaagggaggccagggcagggccgttgcctcactcagggctgtgtggccagcctggggcggggcccagggatgtcgggcccctcccggcatcactccgcccgctccccacaggtgacgctgagctacggtatgtttgaaaacaagcggaacgccgtccacgtgaaggggcccttctcggtggaggccgacccatccaggtaaggaaaccccggcccagatgggcttgcgtagggtggcctaggggcgtcagggggcctcgtggagctgcagcagggtctctctaagcggcatgactctacatagaggtgtcccccggagtcctgcttgctcggggtggggccgccagtgttgtgggactgcaaatgggagctcagcacctgcctgccacccacgcagaccagcccctgctctgttcccacaggttccgctccatccactgccacctgtacccggacacaccctggtgtccccgcactgccatcttctagtggccatggctgagacccaatccctgggcgcccctggtatccaaagggcccagggaccctgttgcgctgccctggcctcggcattcgaggctcccctagggccgtgcctgtgcgtgtgcgtgtgcgtgtgtgtgtgtgtgtactgcatgcccacccgggtagcaggctgctgggcagttctgctctgtggaggggcgggcaccagcgccacttatgtgcctctgctccgagggccagtgggctgcagggcctgcttggaggaaggatttgtgtgtcggaggccactccgagggcaattctgttaggatttttggatctttctacagctacggggctccgggctactttgcagggatgcgatgcgtaggtgcctttctcttcctgctgaccacaagctctgtgctgggggtacctgtgccctgaagtcctggcccctgtgtcatagccccaagtacgactcactgagccatgctcattgcaggggaggctgggtctgggggtgcgtgacccaatccccttcctcctggcctggacgctgtggcttaagagtaacagcagccaccgcccagttccagtggccccacgaagcccccagtggctggctgtccagctgggcaaacagtggcacccctcccagctcttctgagtggggagtcttccaggcctcctcagaggtcttccctttgcctccccaggacagggtgagtcagagctcagcatttaatctcctctccaaagtagagagcaagtcgcccacagtgggcgtgtctgtaaatattgtgacagtatttttttactgtgctgttttttttgaaaggggatgggtaaaaagtagggtgttcttgttttttgcttgggagggtgggggtgggggagggtcttattttatcttatcttttctgtggatcagaaaaaacagaagccaaactcggggtcatctttgtttttaaagctgaagtgggactgtctggcactctgtgtatttatgcgttccagcatctggaacctcccatccctgccctcctcctgtgtagctgccacctccccgctgggcccagcatggctcacctgtcccgtgggctgtgtttcttgttgtttttctctttgcaaagacatagctaggaaagcgaatgataagggaaaagttctcagggaattgaagtgttgttgctatggtgacgtccttttgctgtgaataaaggtgctctttgcagcaatcctgggggtcctggtcttggctggaggtggggcctaagccccagggcagccagggtcaggagaggcacacaggtgaaggggaggcttggccttgggtgcaccgcatggagcaggtagataggaaacgcttagagacaactattttggaacgaaacctggcgtcactatagctgcctgctggtgactacaggtgcggcccacccagggtcagggtggtcgctggagcgtgagccctgtgcttccaggaggaacaggtctaggatgctgggggctctaggtcccagccaaaagcacaaccccaaggctctggcctggtctggccactggggagcccagcccctgcaggagggacagtgactcctgtgaccgggcctggggcctccttatccaacttcactcctgccacgagctcacagagtccacatcatcgcctcactttgcaggtggggaaactgaggcacggagcagctgatgcccaaggtccagcagccatgctggtgggctggggaggcgctcagactccaagccaggcaggccgtgggtccggccgccccacagctggtaatgctgcacctccctctcctgtgatgtggccccaggccccgaccccgctcaggggtggtgggaagagtcctggagagcaggagcagtgccggagcccccactgcagctggtcccagcccctgcagagatccagacgcttgttttttaaatacagcagctctgcggtgcttttccttcctcaaatccagcctttgagggtgactgagtaggggacgggtgctgcagcctctgcggggattccctcccctcaccctcctggcagccccggggcggctcacttcctcttcaccatgagcccccaccccttccctggggcttacacccttggcctggcactgccctggccgcgccccttgcaagttcctgctctggcctgaccctgcttcccccgaccccagggctccaggtccccctcctggtgcctctgcaccccccactctgctccaaggagacgacacactgtgaaaagtgcctctctatgggggggtgccttgccctcccccgtcgctgccccctccagaagagtgctgacgtgctgaatgggcctgcagagacccccttactctaagcctggctgggggctaccctggccttgggggcggctggcagggctgtgaccccaccttggccttggacggtcctgagtcagcagagcagctgcctggggggtgtggacagtgatggggatggcgggaggatggagggccctcaccgtcacgtggcctgacccccgtctgggtggctgtggtcctccctgagcacccaccatgtgcccacccacttctcataggacggcataggcccctcttctgaacgaggaagctgagactctggggtggggcggggggggtcgtgacggaacaggctgcgggcagaggctgctggcctccttcctgcccggctgactcagaggcttggggccttctgccctggccccgacgctgtccccgcctgcagctggcatcgcctccccacagagctggtggggccccgggggcagaggtgtggctggacccaggggtcggacagacccatggatacagctgtgggggccctgccagggcttggggagtccccattaatgttcatatgtccctgtgtgtggagcggggtgggagtgggggctaagtgggcatcggggagagcagaggagcaagaagtggggtggggaggaagcccggctcctcccgaggcctcgacctctccatctgacaaatgggaacaaaggtaaatgcagtccccgggtgctggaggtcagggggtgttttggaaggtgcacaggacagcgcatctggccccttcctcttccaagctgagggagggacgtttctctgccctcaaaaggggaagcaggcccagcagtgtcttaggggaatgaggcagcctgacctcttccatccaccgcccccccaccccccagaaggtgactcacccggcaggggaggtgaagtcattcctcccccaggtacattctggggacagctgtgtcccacccaccagtggtgccatcacatcagattagaggtctggtcagaaaggggcctggctggtccctggggctccatgtccccccagtctagcccagccaggccccctttcccaaacttctgatcattaatggggctttcaaaacaagtaaaactgcaaccacaggggctgcagggcgctcagcgagggtggcagacctcagccgccacccctgcttccgttctgccaggcgagtgcctggggagccccaaggctgcttggggtctgggaggggctgctagggtggggcgcctccccactcagttgaaaggaacttcccttccactggggccatcagggccaacttcctggaagaggtgcctctgagctgaagcaggaaggctttgtcaagatggagtagggagagaaggggccttccaggtctcagcacagcctgggcaaaggtgcagaggtgggatccactgggaggactggaagcctgggaaggagggcaggcaatgcagttgggtctcttgatcccccctccccaatcacagacaactagggctctccacaggctcagaggggccagggccaggctgctatgtgacttcagccattcttgccgggtgggcctggggtcagagggaaagcagggaccagggccagatccatcttcgagtctgtcagaacaatgggcaagtcttgttccctgctgggtccatgtgcccacacagcctcagccttcttagatattctgcagggtgaccccctgcttctgagcccagccccaccttctgagcccagaattggacacacaggaaggcccttggggccaggcgtggtggctcacagccgggctgtgccctctgcctggagccgcagcctggatgcctcccaccccacatttaggcttcaggccccacagctgcctcttcccagaaccctcccggcacgcacttcggcgactcttacaagtacctgttcagcgtcagccttcgcccaggagtgcaggctggggacgagggcagtggccacctctgccggtcctgtcagcacctagtgcaatgtccagcccaccgtgggcactcaacgcaggcggctgtgctgccgcaggtcacagcaccaatcagacacccccatccccacacacaccctgcaccggcccacgcggccatcacactcggagcacacgcgctccgatgtggctgcactgttggcacacgcacaggcgcgcacgtgggcgcatacacgccggggcgccctgacctccccgcacgccctcccgcagccgccccggcctctgtccccacgcgtgtcacacacggctgggtgtgctcgctcacgccgtcccgcgacgttgctccagccggtgcccggagctcgatcgggagagctgctgttggccgcctctgcctgccagcgtttgccaagcggtttccatggtgacacatcttggctccgacaggaaccaaggagtgtggggaagagggtccccacggagggggcgaggcgaggcaggaggtctctgcgtcttcaggctcccggcaggcatggggggctccacgagtgcagacaccccccaatcccaagccaggcttgcaccccgagaaggaggctctgggctggtccctctgggctgcctggcacagggactgacttaggtcagtcagtcattcaacaaactttctggaagagccactctgtgctcacagccgggtctacgatgctgcccaagacgtggtctcgcaagaggctcggagtcgaatcctgaggctaaactgacgtcccgccaccctactgaaggccccatctagcaggttggtccgtggctgcgtaagcaccaaggcccaccaagcactttctcaaaggggggctcccctctgtggtagatcagttacaaacgtgtccccgatgccccactcctccctgaatcaccacgccctttgctgtgtgactttgccccaactcctgtctagaggtggcgtctacttccccatccttcaatctgagcctgtcttatgacttgctgtggccaataaaaggtgacagcaatgacattcccagctctgagcttaagcctccagggacatgcgtgcctctgcctgctctccccgactcctgctatagcacgagaacgggctgggctgctttgctggaaggcaagagggcgatggagcctgggtcaccctagctgaggccatcctggactagctagctcccagctgcccacagatgtgtgagtgagcccagctaggacttgccaggcctagcaatgagcagcagtaccaccaggccctttaatactaaggacatgtgaagtcatgtgtttggagctatttgttactcagcactagctacctgatacccctctctctagggccctggccagcagctgcccaacctcagttagcacaggccagaggctctaaaagttcccaggggtgctaagaaccaggccatggtgacagctggattccgctggctaacagtgccagagggtgccagggacagagcttgtgggagggggttcccaagtcaagtccatggcaggagctactgaagcagaagcacgagtctccactgcctttctttgcctcggtttttccccctgtgaaatgggcccatcaccctgtcctgtctcttggggacccctggtaaggtagcgtgtgtggcagctggaaacagacctactacgtgccagccccgggttgcaacctagggagagaggcccattgctgccttctaggttcccacaactgagaaggcagcgtcactaatcccagcttacagactggaaacagtggggagaggatgagtggcttgcccgaggcccaggacacacaggagcaggtgggcatggccacaagccccggctgggtctgagctggtggttatcttcatgtttttctccctgtggtcacctttttggaaattttttttttttttttttttttttttttacatttgactattttcttgtttattggtatttctttgggagattttttttttttttttttttttgagatggagtttcgttctttttttttttattttttttttttttattgatcattcttgggtgtttctcgcagagggggatttggcagggtcacaggacaatagtggagggaaggtcagcagataaacaagtgaacaaaggtctctggttttcctaggcagaggtccctgcggccttccgcagtgtttgtgtccctgggtacttgagattagggagtggtgatgactcttaacgagcatgctgccttcaagcatctgtttaacaaagcacatcttgcaccgcccttaatccatttaaccctgagtggacacagcacatgtttcagagagcacggggttggggataaggtgacagatcaacaggatcccaaggcagaagaatttttcttagtacagaacaaaatgaaaagtctcccatgtctacttctatccacacagacccggcaaccatccgatttctcaattttttccccacccttcccgcctttctattccacaaaaccgccattgtcatcatggcccatccccaatgagccgctgggcacacctcccagacggggtcgtggccgggcagaggggctcctcacttcccagtaggggcggccgggcagaagcacccctcacctcccggacggggcggctggccgggcagaggggctcctcacttcccagtaggggcggccgggcagaggcgcccctcacctcccggatggggcggctggccaggcggggggctgatccccccacctccctcccggacggggcggctggctgggcggggggctgaccccccacctccctcccggactgggcggctggccgggcggggggctgaccccccacctccctcccggacggggcggctggccgggcagagggctcctcacttcccagtaggggcggccgggcagaggagcccctcacctcccggacggggcggctggcccggcggggggctgacccccccccacctccctcccggacggggcggctgccgggcggagacgctcctcacttcccagacggggcagctgccgggcggaggggctcctcacttctcagacggggcggttgccaggcagagggtttcctcacttctcagacggggcggccgggcagagacgctcctcacctcccagacagggttgcggcccagcagaggcgctcctcacatcccagacagggcggcggggcagaggcgctccccacatctcagacgatgggcggcggggaagaggcgctcctcgcttcctagatgggatggcggccgggaagaggcgctcctcacttcctagatgggatggcggccgggcagagacgctcctcactttccagactgggcagccaggcagagaggctcctcatatcccagacgatggggggccaggcagagacgctcctcacttcccacacggggtggcggctgggcagaggctgcaatcttggcactttggggggccaaggcgggcagctgggaggtggaggttgtagcgagccgagatcacgccgctgcactccagcctgggcaccattgagcactgagtgaacgagactccgtctgcaatcccagcacctcgggaggccgaggctggcggatcactcgcggttaggagctggagaccagcccggccaacacagcaaaaccccgtctccaccaaaaaaaaaaacgaaaaccagtcaggcgtggcggcgcgcgcctgcaatcacaggcactcggcaggctgaggcaggagaatcaggcagggaggttgcagtgagccgagatggcagcagtaccgtccagctttggcttggcatcagagggagaccgtggaaggagaccgtggagagagagggagacggagagggagagggagagggggagggggagggggagggggagggagagggagagggagagggagagggagaggctgtgtgtcagaggttttcctcggagtttcgttcttgttgcccaggctggagtgcaatggcacagtcttggctaattgcaacctctcccctttttggaaatattgtacttcctgagctaactgcacttacgaggtaatgattggtgtgagtttctagtctctgtttgtttgttttttgagacagagtctcattctgtcacccaggctggagtgcagtggcacaatcttggctcactgcaacctctgcctcccgggttcaagcgattctcctacctcagcctcctgagtagctgggatgacaggcacctgccaccatgcccagctaatttttgtatttttagtagacaaggtctcaccatgttggccaggctggtcctgaactcctgacctcaagtgatccacccgcctcggcctctcaaaatgctgggattacaggcgtgagccactgcgccccggctcgctcctttttttttttttttgagacagagtctcactctgttgcccaggatagagtgcagtggtgtgattttggctcactgcaacctttgcctcccggattcaagtgattctcctgcctcagcctcctgagtagctgtgattacaggtgcccaccaccatgcctagctaatttttgtatttttagtggacggggtctcaccgtgttagccaggctggtcttgaactcctgagctcgagagatccgcccacctcggcctcccaaagtgctgagattacaggcgtgagccaccacgctgggccctgcagtctcttttcactgggtactgcggttcagtgttactgcctaggggcagctgatccgcagagcccctccctctctgagttcccccaggccagagctgagagccaggctctccagatccctgtgggagggccttgtatctgagtccagttttcctccagcacgaggcctggcatttaattacctgctatcttgtcagctgttcagtgttcctggcctttggatatttcacccagcgtgtttcattgtcttcagggaaacggctggtccaggcacctagcctgctgtcaccgggaagggacatgtgccccgaggcggggctgatgtcactgctgcaccctggtggggcgcaccagcccacggctgtgccacccgggaggtgcccttttgttggagggcatttgccaaaaccagcaaacttgggttctcattctgtggccttgaggggtcagggggacagaagtcagggccagtcctgcccaaaatggggagcattatagaaaacccttcccaccttaagctgaaaacctaaaggtctacactcttagggtaagaatgaaacggaattagccctgctccctccacacgaaagacacttggtgctaagagaagcaaaaagaaaaagttcttcagaagttagggctacaggtcttctctagcacagatttgaggtgctagcacagatttgaggtgctgccaagaatgcagagaactccaagcactcaatgcgttgttttgacatagggtctctctctgtcacccaggctggagtgcggtggtgtgatcacggctcactgcagcctcgaactcctgggctcaagcaatcctcccacctcagcctcccaagtagctgggacttcaggtgcataccaccatgcccagctaattaaaaacaaaagagatacggcaggtggatcacctgaggttaggagtttgagaccagcctggccaaactggtgagattctgtctctactaaaaatacaaaaattagccaggcatgatggtgggcgcctgtaatcccagctactggggaggctgaggcagaattgcttgaacccaggaggcggaggttgcagtgagccgagatcacaccactgcactccagcctgggcaacaagactgagactccatctctgaacaaaaaaaaatgtgtagagatggggtcttgctatgttgtccaggctattctcaaactcctggccttaaacaatcctcctacctcggcctcccgaagtgttggaattacaggcgtgagccactgcgcccagcccccaggaataattttaaccaaaataaattggccgggcggagtggctcacgcctgtaatcacagcactttgggaggctgaggtgggtcaatcacctgaggtcaggagttcgagaccagcctggctaacatggtgaaactccgtttctactaaaaatacaaaaaaattagccaggcatggtggcgtgcgcctgtaatcccagctactcgggaggctgaggcaggagaatcacttgaacccaggaggcagaggttgcagtgagccgagatcgtgccattgcactccagcttgggcaacaagagcgaaactccatcacaaaaaacagacagacagacagatagataaaaaataaacagtgctgggaaaactggatatccacatgcgaatgaatgacactggacccttgtctcagatcattattattaaattaactcaaaaagggttaaagaaagacttcaatgccatttattttgagtagaaataagtcatttctttaatacatcaaactgtgggatttcttgaccttgcttctctcctggtcctggcttccccagaggatccaccgggctgggctggagccctggggctggcagtgtcccacagaaggacatggtgctgcctcccttggtcctgagccccagtggcagactctggttctgctcagtagcagtcggcctcgtccccctgcaggaagcctcccgtggccagcatgtcctgcaggagggactggggactcttttccacgtggtcgctgctctcggccagcgtgctccgcaggccctccaggtctagggacctgagcatggccagcacagcctcaggctcctggtcccctgggggctgggcctgctcacccgcccgccacctcggcagggtggcctctgcggaggcagtgttggggctgcccctggcctcccgcaggctgctgtaggaagcaatcttgtccctcaggaagagaaggaggtcacaagacttctgcgccacagggcggtcgcagtcaaacaaggcacaaaaggcgaagtcaaagagccccacgtggcagagagccctcagtgcctcggtgagtggctgggctggggccacctcgggtagggccacggcataggggcagtgggtacgcggcggccccaaagtctggcccaggaacacgagggccagctccaggccctgggcgcggacctcccagtccaggtctcggctcgccgcctgcagcacagtggccacgaactgctccgtgtcctgggccgcgtcggcgtggccgtcccgcagccactcagtgaagacttgcatgaccgcccgccgtgggaagccctccgagtctacggagaggatgtgcaggagctccaggaacaggctctgggggacagggagcaagtgcggatggttggtggggtggcaggagcgaggctcccgcaacaggactccggtacatgatgggggctggccccggacatgcagtctagggccacagcccgctctgacaccttcccatgctgcgcagtgagcacacggccctccaatcctcagtttacccatctgtcaaatggaggtaaccatgtctaagtggaggggtgctggggagacagaaggcgaagcgcacaggtcccacacccagcacagccccagggcctcggcagtcactgctgcaggcgctgcccacagcagcagctgctcccacgctgcatgctggccgctcgaccacccgcaagcaaacgagcacacacgatggccaggcgggagttgctggctg

SEQ ID NO: 268 - DNA, 1377 bp, Homo sapiens
atgctcaagcgctgcggccggcgcctgctgctggcgctggcgggcgcgctgctcgcctgcctgctggtgctcaccgccgacccgccgccgcctccactgcccgccgagcgcggccggcgcgcgctgcgcagcctggcgggccccgcgggggctgccccggcgcccgggctgggggcggcggcggcggcgcccggggcgctggtccgcgacgtgcacagtctgtccgagtacttcagcctgctcacccgcgcgcgcagagatgcgggcccgccgcccggggctgccccccgccccgccgacggccacccgcgccccctggccgagccgctcgcgccccgagacgtcttcatcgctgtcaagaccaccaaaaagttccaccgcgcgcgcctcgacctgctgctggagacctggatctcgcgccacaaggagatgacgttcatcttcactgacggggaagatgaggccctggccaggcacacgggcaacgtggtcatcacaaactgctcggccgcccacagccgccaggcgctgtcctgcaagatggccgtggagtatgaccgcttcatcgagtccggcaggaagtggttctgccacgtggacgatgacaactacgtcaacctgcgggccctgctgcggctgctggccagctacccgcacacgcgggacgtctacgtcggcaagcccagcctggacaggcccatccaggccatggagcgggtcagcgagaacaaggtgcgtcctgtccacttctggtttgccacgggcggcgctggcttctgcatcagccgtgggctggctctgaagatgagcccgtgggccagcgggggtcacttcatgaatacggctgagcggatccggctgcctgatgactgcaccatcggctacatcgtggaggccctgctgggtgtgcccctcatccgcagcggcctcttccactcccacctggagaacctgcagcaggtgcccacctcagagctccacgagcaggtgacgctgagctacggtatgtttgaaaacaagcggaacgccgtccacgtgaaggggcccttctcggtggaggccgacccatccaggtggggaaactgaggcacggagcagctgatgcccaaggtccagcagccatgctggtgggctggggaggcgctcagactccaagccaggcaggccgtgggtccggccgccccacagctggtaatgctgcacctccctctcctgtgatgtggccccaggccccgaccccgctcaggggtggtgggaagagtcctggagagcaggagcagtgccggagcccccactgcagctggtcccagcccctgcagagatccagacgcttgttttttaaatacagcagctctgcggtgcttttccttcctcaaa

SEQ ID NO: 269 - protein, 357 aa, Homo sapiens
MLKRCGRRLLLAGALLACLLVLTADPPPPPLPAERGRRALRSLAGPAGAAPAPGLGAAAAAPGALVRDVHSLSEYFSLLTRARRDAGPPPGAAPRPADGHPRPLAEPLAPRDVFIAVKTTKKFHRARLDLLLETWISRHKEMTFIFTDGEDEARHTGNVVITNCSAAHSRQALSCKMAVEYDRFIESGRKWFCHVDDDNYVNLRALLRLLASYPHTRDVYVGKPSLDRPIQAMERVSENKVRPVHFWFATGGAGFCISRGLALKMSPWASGGHFMNTAERIRLPDDCTIGYIVEALLGVPLIRSGLFHSHLENLQQVPTSELHEQVTLSYGMFENKRNAVHVKGPFSVEADPSRWGN

SEQ ID NO: 270 - DNA, 2638 bp, Homo sapiens
atgacaccaggtcgctgctgtcttgcggctgacattcaggtagagacgttcatcttcactgacggggaagatgaggccctggccaggcacacgggcaacgtggtcatcacaaactgctcggccgcccacagccgccaggcgctgtcctgcaagatggccgtggagtatgaccgcttcatcgagtccggcaggaagtggttctgccacgtggacgatgacaactacgtcaacctgcgggccctgctgcggctgctggccagctacccgcacacgcgggacgtctacgtcggcaagcccagcctggacaggcccatccaggccatggagcgggtcagcgagaacaaggtgcgtcctgtccacttctggtttgccacgggcggcgctggcttctgcatcagccgtgggctggctctgaagatgagcccgtgggccagcgggggtcacttcatgaatacggctgagcggatccggctgcctgatgactgcaccatcggctacatcgtggaggccctgctgggtgtgcccctcatccgcagcggcctcttccactcccacctggagaacctgcagcaggtgcccacctcagagctccacgagcaggtgacgctgagctacggtatgtttgaaaacaagcggaacgccgtccacgtgaaggggcccttctcggtggaggccgacccatccaggttccgctccatccactgccacctgtacccggacacaccctggtgtccccgcactgccatcttctagtggccatggctgagacccaatccctgggcgcccctggtatccaaagggcccagggaccctgttgcgctgccctggcctcggcattcgaggctcccctagggccgtgcctgtgcgtgtgcgtgtgcgtgtgtgtgtgtgtgtactgcatgcccacccgggtagcaggctgctgggcagttctgctctgtggaggggcgggcaccagcgccacttatgtgcctctgctccgagggccagtgggctgcagggcctgcttggaggaaggatttgtgtgtcggaggccactccgagggcaattctgttaggatttttggatctttctacagctacggggctccgggctactttgcagggatgcgatgcgtaggtgcctttctcttcctgctgaccacaagctctgtgctgggggtacctgtgccctgaagtcctggcccctgtgtcatagccccaagtacgactcactgagccatgctcattgcaggggaggctgggtctgggggtgcgtgacccaatccccttcctcctggcctggacgctgtggcttaagagtaacagcagccaccgcccagttccagtggccccacgaagcccccagtggctggctgtccagctgggcaaacagtggcacccctcccagctcttctgagtggggagtcttccaggcctcctcagaggtcttccctttgcctccccaggacagggtgagtcagagctcagcatttaatctcctctccaaagtagagagcaagtcgcccacagtgggcgtgtctgtaaatattgtgacagtatttttttactgtgctgttttttttgaaaggggatgggtaaaaagtagggtgttcttgttttttgcttgggagggtgggggtgggggagggtcttattttatcttatcttttctgtggatcagaaaaaacagaagccaaactcggggtcatctttgtttttaaagctgaagtgggactgtctggcactctgtgtatttatgcgttccagcatctggaacctcccatccctgccctcctcctgtgtagctgccacctccccgctgggcccagcatggctcacctgtcccgtgggctgtgtttcttgttgtttttctctttgcaaagacatagctaggaaagcgaatgataagggaaaagttctcagggaattgaagtgttgttgctatggtgacgtccttttgctgtgaataaaggtgctctttgcagcaatcctgggggtcctggtcttggctggaggtggggcctaagccccagggcagccagggtcaggagaggcacacaggtgaaggggaggcttggccttgggtgcaccgcatggagcaggtagataggaaacgcttagagacaactattttggaacgaaacctggcgtcactatagctgcctgctggtgactacaggtgcggcccacccagggtcagggtggtcgctggagcgtgagccctgtgcttccaggaggaacaggtctaggatgctgggggctctaggtcccagccaaaagcacaaccccaaggctctggcctggtctggccactggggagcccagcccctgcaggagggacagtgactcctgtgaccgggcctggggcctccttatccaacttcactcctgccacgagctcacagagtccacatcatcgcctcactttgcaggtggggaaactgaggcacggagcagctgatgcccaaggtccagcagccatgctggtgggctggggaggcgctcagactccaagccaggcaggccgtgggtccggccgccccacagctggtaatgctgcacctccctctcctgtgatgtggccccaggccccgaccccgctcaggggtggtgggaagagtcctggagagcaggagcagtgccggagcccccactg

SEQ ID NO: 271 - protein, 248 aa, Homo sapiens
MTPGRCCLAADIQVETFIFTDGEDEARHTGNVVITNCSAAHSRQALSCKMAVEYDRFIESGRKWFCHVDDDNYVNLRALLRLLASYPHTRDVYVGKPSLDRPIQAMERVSENKVRPVHFWFATGGAGFCISRGLALKMSPWASGGHFMNTAERIRLPDDCTIGYIVEALLGVPLIRSGLFHSHLENLQQVPTSELHEQVTLSYGMFENKRNAVHVKGPFSVEADPSRFRSIHCHLYPDTPWCPRTAIF

SEQ ID NO: 272 - DNA, 2926 bp, Homo sapiens
cctgctggtgctcaccgccgacccgccgccgcctccactgcccgccgagcgcggccggcgcgcgctgcgcagcctggcgggccccgcgggggctgccccggcgcccgggctgggggcggcggcggcggcgcccggggcgctggtccgcgacgtgcacaagatgcgggcccgccgcccggggctgccccccgccccgccgacggccacccgcgccccctggccgagccgctcgcgccccgagacgtcttcatcgctgtcaagaccaccaaaaagttccaccgcgcgcgcctcgacctgctgctggagacctggatctcgcgccacaaggagatgacgttcatcttcactgacggggaagatgaggccctggccaggcacacgggcaacgtggtcatcacaaactgctcggccgcccacagccgccaggcgctgtcctgcaagatggccgtggagtatgaccgcttcatcgagtccggcaggaagtggttctgccacgtggacgatgacaactacgtcaacctgcgggccctgctgcggctgctggccagctacccgcacacgcgggacgtctacgtcggcaagcccagcctggacaggcccatccaggccatggagcgggtcagcgagaacaaggtgcgtcctgtccacttctggtttgccacgggcggcgctggcttctgcatcagccgtgggctggctctgaagatgagcccgtgggccagcgggggtcacttcatgaatacggctgagcggatccggctgcctgatgactgcaccatcggctacatcgtggaggccctgctgggtgtgcccctcatccgcagcggcctcttccactcccacctggagaacctgcagcaggtgcccacctcagagctccacgagcaggtgacgctgagctacggtatgtttgaaaacaagcggaacgccgtccacgtgaaggggcccttctcggtggaggccgacccatccaggttccgctccatccactgccacctgtacccggacacaccctggtgtccccgcactgccatcttctagtggccatggctgagacccaatccctgggcgcccctggtatccaaagggcccagggaccctgttgcgctgccctggcctcggcattcgaggctcccctagggccgtgcctgtgcgtgtgcgtgtgcgtgtgtgtgtgtgtgtactgcatgcccacccgggtagcaggctgctgggcagttctgctctgtggaggggcgggcaccagcgccacttatgtgcctctgctccgagggccagtgggctgcagggcctgcttggaggaaggatttgtgtgtcggaggccactccgagggcaattctgttaggatttttggatctttctacagctacggggctccgggctactttgcagggatgcgatgcgtaggtgcctttctcttcctgctgaccacaagctctgtgctgggggtacctgtgccctgaagtcctggcccctgtgtcatagccccaagtacgactcactgagccatgctcattgcaggggaggctgggtctgggggtgcgtgacccaatccccttcctcctggcctggacgctgtggcttaagagtaacagcagccaccgcccagttccagtggccccacgaagcccccagtggctggctgtccagctgggcaaacagtggcacccctcccagctcttctgagtggggagtcttccaggcctcctcagaggtcttccctttgcctccccaggacagggtgagtcagagctcagcatttaatctcctctccaaagtagagagcaagtcgcccacagtgggcgtgtctgtaaatattgtgacagtatttttttactgtgctgttttttttgaaaggggatgggtaaaaagtagggtgttcttgttttttgcttgggagggtgggggtgggggagggtcttattttatcttatcttttctgtggatcagaaaaaacagaagccaaactcggggtcatctttgtttttaaagctgaagtgggactgtctggcactctgtgtatttatgcgttccagcatctggaacctcccatccctgccctcctcctgtgtagctgccacctccccgctgggcccagcatggctcacctgtcccgtgggctgtgtttcttgttgtttttctctttgcaaagacatagctaggaaagcgaatgataagggaaaagttctcagggaattgaagtgttgttgctatggtgacgtccttttgctgtgaataaaggtgctctttgcagcaatcctgggggtcctggtcttggctggaggtggggcctaagccccagggcagccagggtcaggagaggcacacaggtgaaggggaggcttggccttgggtgcaccgcatggagcaggtagataggaaacgcttagagacaactattttggaacgaaacctggcgtcactatagctgcctgctggtgactacaggtgcggcccacccagggtcagggtggtcgctggagcgtgagccctgtgcttccaggaggaacaggtctaggatgctgggggctctaggtcccagccaaaagcacaaccccaaggctctggcctggtctggccactggggagcccagcccctgcaggagggacagtgactcctgtgaccgggcctggggcctccttatccaacttcactcctgccacgagctcacagagtccacatcatcgcctcactttgcaggtggggaaactgaggcacggagcagctgatgcccaaggtccagcagccatgctggtgggctggggaggcgctcagactccaagccaggcaggccgtgggtccggccgccccacagctggtaatgctgcacctccctctcctgtgatgtggccccaggccccgaccccgctcaggggtggtgggaagagtcctggagagcaggagcagtgccggagcccccactg

SEQ ID NO: 273 - protein, 234 aa, Homo sapiens
MTFIFTDGEDEARHTGNVVITNCSAAHSRQALSCKMAVEYDRFIESGRKWFCHVDDDNYVNLRALLRLLASYPHTRDVYVGKPSLDRPIQAMERVSENKVRPVHFWFATGGAGFCISRGLALKMSPWASGGHFMNTAERIRLPDDCTIGYIVEALLGVPLIRSGLFHSHLENLQQVPTSELHEQVTLSYGMFENKRNAVHVKGPFSVEADPSRFRSIHCHLYPDTPWCPRTAIF

SEQ ID NO: 274 - DNA, 1278 bp, Homo sapiens
cctgctggtgctcaccgccgacccgccgccgcctccactgcccgccgagcgcggccggcgcgcgctgcgcagcctggcgggccccgcgggggctgccccggcgcccgggctgggggcggcggcggcggcgcccggggcgctggtccgcgacgtgcacaagatgcgggcccgccgcccggggctgccccccgccccgccgacggccacccgcgccccctggccgagccgctcgcgccccgagacgtcttcatcgctgtcaagaccaccaaaaagttccaccgcgcgcgcctcgacctgctgctggagacctggatctcgcgccacaaggagatgacgttcatcttcactgacggggaagatgaggccctggccaggcacacgggcaacgtggtcatcacaaactgctcggccgcccacagccgccaggcgctgtcctgcaagatggccgtggagtatgaccgcttcatcgagtccggcaggaagtggttctgccacgtggacgatgacaactacgtcaacctgcgggccctgctgcggctgctggccagctacccgcacacgcgggacgtctacgtcggcaagcccagcctggacaggcccatccaggccatggagcgggtcagcgagaacaaggtgcgtcctgtccacttctggtttgccacgggcggcgctggcttctgcatcagccgtgggctggctctgaagatgagcccgtgggccagcgggggtcacttcatgaatacggctgagcggatccggctgcctgatgactgcaccatcggctacatcgtggaggccctgctgggtgtgcccctcatccgcagcggcctcttccactcccacctggagaacctgcagcaggtgcccacctcagagctccacgagcaggtgacgctgagctacggtatgtttgaaaacaagcggaacgccgtccacgtgaaggggcccttctcggtggaggccgacccatccaggtggggaaactgaggcacggagcagctgatgcccaaggtccagcagccatgctggtgggctggggaggcgctcagactccaagccaggcaggccgtgggtccggccgccccacagctggtaatgctgcacctccctctcctgtgatgtggccccaggccccgaccccgctcaggggtggtgggaagagtcctggagagcaggagcagtgccggagcccccactgcagctggtcccagcccctgcagagatccagacgcttgttttttaaatacagcagctctgcggtgcttttccttcctcaaa

SEQ ID NO: 275 - protein, 216 aa, Homo sapiens
MTFIFTDGEDEARHTGNVVITNCSAAHSRQALSCKMAVEYDRFIESGRKWFCHVDDDNYVNLRALLRLLASYPHTRDVYVGKPSLDRPIQAMERVSENKVRPVHFWFATGGAGFCISRGLALKMSPWASGGHFMNTAERIRLPDDCTIGYIVEALLGVPLIRSGLFHSHLENLQQVPTSELHEQVTLSYGMFENKRNAVHVKGPFSVEADPSRWGN

SEQ ID NO: 276 - DNA, 3025 bp, Homo sapiens
atgctcaagcgctgcggccggcgcctgctgctggcgctggcgggcgcgctgctcgcctgcctgctggtgctcaccgccgacccgccgccgcctccactgcccgccgagcgcggccggcgcgcgctgcgcagcctggcgggccccgcgggggctgccccggcgcccgggctgggggcggcggcggcggcgcccggggcgctggtccgcgacgtgcacagtctgtccgagtacttcagcctgctcacccgcgcgcgcagagatgcgggcccgccgcccggggctgccccccgccccgccgacggccacccgcgccccctggccgagccgctcgcgccccgagacgtcttcatcgctgtcaagaccaccaaaaagttccaccgcgcgcgcctcgacctgctgctggagacctggatctcgcgccacaaggagatgacgttcatcttcactgacggggaagatgaggccctggccaggcacacgggcaacgtggtcatcacaaactgctcggccgcccacagccgccaggcgctgtcctgcaagatggccgtggagtatgaccgcttcatcgagtccggcaggaagtggttctgccacgtggacgatgacaactacgtcaacctgcgggccctgctgcggctgctggccagctacccgcacacgcgggacgtctacgtcggcaagcccagcctggacaggcccatccaggccatggagcgggtcagcgagaacaaggtgcgtcctgtccacttctggtttgccacgggcggcgctggcttctgcatcagccgtgggctggctctgaagatgagcccgtgggccagcgggggtcacttcatgaatacggctgagcggatccggctgcctgatgactgcaccatcggctacatcgtggaggccctgctgggtgtgcccctcatccgcagcggcctcttccactcccacctggagaacctgcagcaggtgcccacctcagagctccacgagcaggtgacgctgagctacggtatgtttgaaaacaagcggaacgccgtccacgtgaaggggcccttctcggtggaggccgacccatccaggttccgctccatccactgccacctgtacccggacacaccctggtgtccccgcactgccatcttctagtggccatggctgagacccaatccctgggcgcccctggtatccaaagggcccagggaccctgttgcgctgccctggcctcggcattcgaggctcccctagggccgtgcctgtgcgtgtgcgtgtgcgtgtgtgtgtgtgtgtactgcatgcccacccgggtagcaggctgctgggcagttctgctctgtggaggggcgggcaccagcgccacttatgtgcctctgctccgagggccagtgggctgcagggcctgcttggaggaaggatttgtgtgtcggaggccactccgagggcaattctgttaggatttttggatctttctacagctacggggctccgggctactttgcagggatgcgatgcgtaggtgcctttctcttcctgctgaccacaagctctgtgctgggggtacctgtgccctgaagtcctggcccctgtgtcatagccccaagtacgactcactgagccatgctcattgcaggggaggctgggtctgggggtgcgtgacccaatccccttcctcctggcctggacgctgtggcttaagagtaacagcagccaccgcccagttccagtggccccacgaagcccccagtggctggctgtccagctgggcaaacagtggcacccctcccagctcttctgagtggggagtcttccaggcctcctcagaggtcttccctttgcctccccaggacagggtgagtcagagctcagcatttaatctcctctccaaagtagagagcaagtcgcccacagtgggcgtgtctgtaaatattgtgacagtatttttttactgtgctgttttttttgaaaggggatgggtaaaaagtagggtgttcttgttttttgcttgggagggtgggggtgggggagggtcttattttatcttatcttttctgtggatcagaaaaaacagaagccaaactcggggtcatctttgtttttaaagctgaagtgggactgtctggcactctgtgtatttatgcgttccagcatctggaacctcccatccctgccctcctcctgtgtagctgccacctccccgctgggcccagcatggctcacctgtcccgtgggctgtgtttcttgttgtttttctctttgcaaagacatagctaggaaagcgaatgataagggaaaagttctcagggaattgaagtgttgttgctatggtgacgtccttttgctgtgaataaaggtgctctttgcagcaatcctgggggtcctggtcttggctggaggtggggcctaagccccagggcagccagggtcaggagaggcacacaggtgaaggggaggcttggccttgggtgcaccgcatggagcaggtagataggaaacgcttagagacaactattttggaacgaaacctggcgtcactatagctgcctgctggtgactacaggtgcggcccacccagggtcagggtggtcgctggagcgtgagccctgtgcttccaggaggaacaggtctaggatgctgggggctctaggtcccagccaaaagcacaaccccaaggctctggcctggtctggccactggggagcccagcccctgcaggagggacagtgactcctgtgaccgggcctggggcctccttatccaacttcactcctgccacgagctcacagagtccacatcatcgcctcactttgcaggtggggaaactgaggcacggagcagctgatgcccaaggtccagcagccatgctggtgggctggggaggcgctcagactccaagccaggcaggccgtgggtccggccgccccacagctggtaatgctgcacctccctctcctgtgatgtggccccaggccccgaccccgctcaggggtggtgggaagagtcctggagagcaggagcagtgccggagcccccactg

SEQ ID NO: 277 - protein, 375 aa, Homo sapiens
MLKRCGRRLLLAGALLACLLVLTADPPPPPLPAERGRRALRSLAGPAGAAPAPGLGAAAAAPGALVRDVHSLSEYFSLLTRARRDAGPPPGAAPRPADGHPRPLAEPLAPRDVFIAVKTTKKFHRARLDLLLETWISRHKEMTFIFTDGEDEARHTGNVVITNCSAAHSRQALSCKMAVEYDRFIESGRKWFCHVDDDNYVNLRALLRLLASYPHTRDVYVGKPSLDRPIQAMERVSENKVRPVHFWFATGGAGFCISRGLALKMSPWASGGHFMNTAERIRLPDDCTIGYIVEALLGVPLIRSGLFHSHLENLQQVPTSELHEQVTLSYGMFENKRNAVHVKGPFSVEADPSRFRSIHCHLYPDTPWCPRTAIF

SEQ ID NO: 278 - DNA, 34471 bp, Mus musculus
  misc_feature (1)...(34471): n = A,T,C or G
agttcaatcctgaagaaaccgcaaggctcaccaactggcctgaggcctcaggagtggcgagctgccgcaggaacctcacaagcaggtcttgggtgagtttctctcaatggtggtatttccacaagttcagctcaacagtgcaatgtaaggcgaaccaatacaagcatgttgttagtgaagagtaatgaggtgaaacaacccaaaccaacgctaaacgcttctctctcactgtctgtggggtcatatttatactccttcatccctggccctttcacatgtttgttatatcaaaacgtcctttcacctgtgtctgcttcagataaacgttctttcacgtgtctgctttagcaagacatcctttcacctgtgtgccccagcaaaacatcatttgacataactgacttcccaaagaaactagaagttgccacttcatctcccccttccctctgaatgtgcttccctcttgtacagcagtgacacccagcagtgtgttctctgtgtggggtgagctgatggtggtcgattgcacattttttttagaatcagtggctaatcttttatcaggggtgggggaggatttcgaactcctttaaatcctgatcttcaactggagtggtggacagacctgcaatcccaacacatgggagtctgagacagtaggattgctccaagttcaagataagcctaaactacagagtgagacattacctcagccaccccacccccagttaaatacttataaatagctcatgttcagctgttgttgcaaattctgggtttgctggcagtattgagccagcatttctcaccagtatgccatgcactccacctgccccccatccatctgaaataaagtcagtcctacccctccaactgcagttggaaaccctgtctatgcctactaagagggataccaggctgcctctctctcacggtgcctgaagctttgcttgtcccttcatgtgcccatgtgcccccctgcacctgttcagaacaagaatcttacatcttggatgggatccctcagtcctgagctgtccctccttcagggaaacctgccattgctaccatccaggaacaagggcacctggatgcgtagttcaacggtaagagagccacatttttttctggctgtgcacctgaagagtccttatattgggaagccaagaagcttgggtcacaatgtagctaatttctgtttgttcccccagatgtcactgggtttatactatgtttatagtggagctggagtgacccttgctgtgtgccttcacacatttagtaatggcaagagcctcttgtctgattgctatgagggcccagtgtgaaaacactgcatggaaacttcaggtggccatagctcagccagggcaggaggtcccaacacattttctgtgaatcctcattagtggcccagcgccttctggagaccttgtaccaccccagagctcctgtccccataggcccagcttagtcctgcaattctggggagtatatctagataccccattgatatctggatcctccattgatagatggtacgcagttgtacatgtggccagaactgggaagacactgcctttctcctctcaatccaagctgatttagattcttgtagtgccgagagagtcatgactgggtatcacaggcagggccaggaaggattaacctactgtctgtatacattatagcttcagaccctgctttgttgctgcccactgtcccaacatagcatctttgctgttcagcgcacagaaggtcccctgttctttggagtctccagtcaccaggtcccggagccacccctcacaaggttggggaagggtatcattccaagatggagtgggtttctaagccgggtttctgcttcttccaagcagacatgttggcctcgaagacagctaggcaaagccttctcagatggacaattgaattttcagttctttaataaaaacactaacgcagaacagaagggaagcagggcttctagaaagagcttctcacaggtgttctgcaaacatcacacgtcctttcctcgaggtgacacctagcctgtcttctgagaaagatcagagatcttggcgaaacccatttgagaagcgagcaaacagaacatttgagaagagaacaaacagaatcttgccctacacgtttcccacgggggcggggtgggggtggggagtgggctttgcacagctttcctgcctatccccgagggcacagtaaggagacctgcattaggtcactttgccattgcatgccgtaattatggacaaaatgcgctttgctccctgggctttgcagcccggagctcctttgggctacaggacttgaggtacgcttaaggttgtacaaggtcacagagatcgtggttgataggagatcgcacgaagggaacctccctttatattggagttttagttttagtttattttcagaaggagaggctgtgttcctatgaaacagggctcttagccaccttcccaggagacctcagtggatgtgtagttcaagcctatcctaggcagcgactagctttcccacttggagtcactcagtggaagcatcctctagctcacagcatgtgcatgcatgcatacatgtgcatgtatgtgccgtgtgcacacacacgcacacacacacacacacacacacacccctaccttttgattgccccaggtcagagaacagggctacctaacttcctattccttccggccacccttgttctttcccatttactcaatgccagactcctgtggatgcccgtgtcactgcctctggtctcgtggcatcatgaccacactatcagtctccacacattccccatgtgtgaagactgacttctgggccgcatctagagatgccaatagatgtcagattgtctaccagaaaagtggggccatttttggcatgtgtgagggatgtggcttacatttagaacctccctgggtagcaaacttcttgagactttaaggatgggttgttcccagcatcattcgtgctttgcctccctctcaggtgctgcttaaggaggggattccttcactctgagaaattcatcttgagttaggaagtctcctcactacccgatcaccataagaggtgcttacacaagcctaggtggcttcaaggtcagccacctgtggcatcttatgcaattgctgtggcactggcaatccatcctcaatggaagtgtcatcaggcctactgtgcgcaactgtatctgaaatggccacttctccttctctttcccttcctcctctctcccctagaagctctcttgtgaaggtcaggtcattttcacgctctgccagtctgcatgagtcccacagcccaaacagcaaagctatttggtctggaacactggccctagcacagatctcaaatctggactggcttcagcccagaaactgagttgctctggggaagagcagggcagggatatatatggtgaccagctctgtccttgtctaaatgctaggtgctggtgaccctgccagcagagatggtcacagaagggatctgatgggacccgggtggggctaaatgggctgctgttgatgctgtcaatggtgctggaatagccaggggagcaggtgacttccaatgcatcatgggagaatgcatatctgtagatcaggagcccagggaggagttgaggactatgaggaggcatactctggaagtggggctgatgaaggagccatagaagatggcaccttctggctttggcattggtggatagagtgtccctaggaagaataggtgtttgttgagccccctcgtaactagccgcaagactgtttgtggtggtttgaataggcttggcccagggagtggcactattagaaggtgtgatattgttggaagaagtgtgtcactgtggaggtgggcaatgagacccttctcctaaccatgtgagagccagtcttctccctagcggtctttagatgaagacatagaactctcagcgcctcctgtgccatgcctgtctagacactgccatgctactgcttctctcagctccttctgcaccatgcctggatgctgctatgttcctgccttgatgataatgggctgaacctctgaacctgtaagccagccccaattaaatttcgtctgtgtaagagttgccttggtcatggtatctgttcacagaagtaaaaccctaagatatttttctttgtccttatctcagctgggtccctctgaggttccttcctatcctgtgccctttatcagttgggagggagaagctttcagtgctatagggatgagacttggagtcagatacatgttaggctcttggccaatgagaagactagaatctggaccatcagtgaggctgataccgtgggggtggggtgaggtcttttcttcagctcccaggttgaatggcagaaggcaggttagcattagtgagggagtggtctctaggtgggtcacacacagtgtcacttgggtgagtgatgctatccaggctgaacgggggaggggggtgttgggggggtgaggccatgggagggtggctcagcagatgctgggatcttttcagtggttggtggaggatggactgtggcagaggtaggaatggaatggtgccctctgtctatagctaggaactttctcagttgcttctggactgttatgtgattcagacagagatggccaatgcaaggctaaaggtagcaagggcaggctgggtagctgagttcctgagttcgactccagatctggcaaagacaggaggatcccaggggctcactgttagccggtctagtaaactcgagagctctaggttcagtgtgactcttctgtagaagtaaggaggtggggaggtggctaaacaagcaagatcacagtagcacacacaggaagggctgagttctaattcccccaaaccacataaaggttggaaatactcccacacactatcgtaatccccagtatggatatcacttgctgtgtgctgtcttgggtccaggtccactgagagaccctgtctcaagggaacaaatcagagtgatggagtggggaacctggcatctttctcgggcttctacatgcctccacagtataccttcatcacatgtgtgtacacacgcatataccacacatgtgcacatgccaaaagaaaaaaaaatagtccagcgactttagggaggggtcctaaatagctagaggcacgccctttgcttctttctctgctttctagttggaggaatgaggatgtgatgggtggtacccaaacagctcgtttggtctgtgaggaggcagcagagtggttgctgaggatgtctagggaggaagacagttggctttggattctgacctgaagcagggggataggagcttgtgggaggagctactactgaaatctggggactgcagcatggatcctggtggctctcagaagcttgagtgaggaggaatgttgcagcctgtctcagtcagggtttctattcctgtgacaaaataccatgaccgaaaaagcaagtggaggtggaaagggtttttattcagcttactcttctccattgctggtcatcactgaaggaaatcagggcaggggcctggctacgggagctgatgcagaggctgtggagggatgctatttactggcttgctccctggcttgctttcagcttgctttcttatagaacccaggaccaccagctcagggatggcaccacccacaatggtctggacccttccctgtcaatcactaattatgaaatgttctactggcttacctacagtctgatcttatagaagcattttctcaatggagattccctcctctcagtcgactttagcgcctgtcaagttgacctaaaactatccagtatggagccataaacctagattccagggtgcagaggggacaggaagatgagagggtacagtatggcttagtctccaacaggggcagtgatgtgatagacaagggggaaagtcatagctaagaaggcacattggggccaggaaaccccaatgcaggcatctcacagcccctgtgaaaatggagtcctcgtgaggaactggctgtggtagtggatactctgggaactgtgtctgtgaaagaggagggtgcagggaactttgttcacagtggaaccccatgaggatgcaggagagaggtgtataaaggggccaggagcagcaactgtagggaccacgatgcagatgctgcaaggaaagatagccttgtaagtgggggttgggggttattcaaacagcaatccccagtaagggatctggggtgactgggtgggtactgtcaggcctctgacatctgggaagcttctatgagattcttcctcacaacaccctgggagaaatgctggtttctcaggacggcaggccagggctttaagggtgactctaccggtcttctgctagcatgctctgtgaatgctagattgagtccagcctgtgacacagtaagcctggcggatcctgcacatgaaacgatgtccagttgatagccagtgatagtccccaggctggaggaagctggggtgagaggttccttgagctctgaaagcctggtggcttctgtgggctttcagaataagcgtccaagttcgggcagtgggatgagtattctggaaaccccctggggacaagggggtgaaatgccctggttggggctgaagcaagatcatcatggctgcctattctggctgctgggcgggaaattcttgtggtcccagggatgggaagaaagttggcacgttccctggcacttggatggtacctaggcctatggatcctgctatgtccagtggcctgtgctgttgtacagataagggtgaaggtgaagtttgtgcctatttaccttacagaccagaaatcccaacaaggaagaggggggcaggagatagataggtggatagatagatagatagatagatagatagatagatagatagatagacagacagacagagaaagggatagaatcagaaaggtagagagatagagagaggatggctggagaaacagagacagatgaactaaaactggggtttttaggacctggatgtagacaaagccattcatctcccactccactggctgttctgggtcctaggttccacctccccacaaggatggctgggaatggagcctagggaggaggccaggcagggtgtagggagcacgagcccaccttttccctcatgcctctgtgggcccctactatgtctcacaggtcagagactctgagtaaagggtaaagactatgcttctctccgcccctggcctggctgcttaataggttcttgctggctgaaggaaggggcgaggggaagatggaggagtggggaggggcctgaactgcatcagcgagactggtcagggtcgtccccacagactaagctatgatggcactggacctgtggctcctaactctgcccagggacaattattccttttgactttacatgtgctttaataaaatggttccatttatctggagggaaaggctaagtcccaggtctgcatgcaaagccaagagccgctcatcacggcttcccgagaagcttccagaagtattctatgcttgggaaacctggcctgtcaatctccccgtcaccatggatatgtctcttgccttctactgttattaaagaatcttccaggggaggaggggggtgggacaagagagagtcgttagccattttctgtggctgggcctcagtatgtcagagagttggagcttgctgggcccacagctgtggagcttcctgagtgttggcagaggtagtgggtaaggccttccttctgcctcagcacaggtcaaaggcgtcacatggctggagggagcgccatgttggctcctgtttctcttccacatcagtgccattgtaggaagccaccttcatgccttcacccccaccctaatggcctctgagatttctgctctcacagacaatcaatataagaatttagggggcttggatttctaatgcatgaacatttaggggcacattcacgccctgtcaaggagaactggcttttatcccaagtcttcatggataccttcctgtgtgtcagtcctcaccccaggctcaggcaagaactgataagaccctattccagtctgtctatgaggttctcccaccctaccccagacagctcctctgcaggaagtctggagccctgatatagctataaggatgcggccatgcggatgccatgggtccagggatgagtctgtagcttggtgggctgataggaggtgggaagtagttggaggaggtaggtctctgggaacatgccttggacacatatcctgtcctcagccttctcccctttccccacttcctgcttgacaagtcagggagcagctttgttctcttatcatggtgtttcactgtggcagatctaagacaccaggggccgggccacccaaaagccacaagaaatctttcctcctttaagctgattttgcctgggaattttgtcacctcaatgaaactaaaatagtaatcccattttacagatttgtgaactgaagttcagcaagtccaggtcacacagccggggtgactctccctagcaatggcagcccacatacctcctttcctggcttgtctcaattctctttttagggttcttgatttcactctccagcatccccagagtcctggggattttgtgtgtgtgcatacgtccctccatatcccagacagggcaccaacgacagagcaagaaacagctccactgaagtctagcttggtgagctagtgagtttcttgtgcacatttatggagtaaggggttgcttacatcagtttgggtgaccacccccccaagcaactatgttactgggaagtcacagctgagcatggatgatggcatccccatagttgtatagatggagtcacttcttctttggctaacctatcctctctagtgtgtaagtacccctgagttcagttacacatcgctaaagctggacctcaggggaggggttcctgttacttctcttcccttcttgtgaggggatgaacatcagcaggtccaatcgtgtggctctcttgtggcagttacagctgccccgatgaagatggtaatggctgttatgtccagagaacagaattcttacaactcccttcttttcacaagagggcagaagcttgtcatatttccccaagcctggcattaaaaccaagatgaaggggagatagaaacggggagtccctggtcctgtgatacaatatgtaaataaacacccattcatttacggagaaattcgtgacttcattgttaaaaataaaagccgtgaactgaaccctgccaccctatctcaccgagagaggaaggattagaacttacaactcggaaaggaagaaagtgataggagggccactcattggccatcaaactgcttatcaagccttaaaaccagtcagtcacctttgaatgctagcctaaataaagggcatctcagagactgaagtaaagggcagcatgtagcgggggctgggggatggctaaaatggagatcagcaaagaggacacctagactctaggtcctagagggatgatgtgtctgtgggtggctttggtgttagggtgtgagcatatgtatgtgtgtgtgtgtgtgtgtgtgtgtgtgtgtgtgtgtgtgtgcatgcgcgtgtgtgctcatgcgtgagcagaagtcgatggtgttagggtggcatgtgtgagatgtagcggggaagagtaggcaaagaagggcctgccccctcaggttctgtgcatagctaggtccctgtaccacagtaactgtgtgagcgtgtgtgccaccacattcagtggctgcccctgggcgtaggaggagatcttatcagtgctaggtgtgtgtggagtttcaggctacctcatcaccccccatctctccacctcccattgggccttgcccctcatcctctatacaggaagtgggctcgccttgggtttcagtctgttgctggcctagctgttgtctgctacctaagctgcggagcaggagatggccgtggacccaacctccagcaggactgcagggaacatctcgacacaactccatgttgcagccaggtgatgcccctgtgtggtcccctgggagccctgggcaccccactacctcttgctggtcctcccaagggacagggagctgggagggggcgctcatctctaacttggttccctttgtagtttgtatctgggctttgatgattaaccttgtcttaggattccctggggaagggggtagcctggctgtcatggtttctcctttaagaataaaccccttccaatgtcagggcacagtggcttcttcccagtctactctgtgggaagctgtgtgccattttcgctaggagggacttccctggatcctgtgtggggatgtcttagcccagaagggtggaggaaaagatttgtagctcgtcagtattgggaggtggcatggcgtgtatgggacaggtgggattcaacgctgacgcctgtggagttcatctcagcctggagaattctccttagtgagaaagagagaaggaatctccccctgggacctggctgtccagtcagctatgttgattgacaggtttctgagggccctaggctggaggtcagaggtagagttctagcttagatttgtctctgacattaccgagtggctagagaggttaaggacatcgccaggcatggggctccgtctccgaggctgcctgaggtaggagcttcccaccgttagctgtgtttacagtacttcagggccaaggtgggtggctgaggaaggcagaactacctttgaaggtcccctttctttcacacactcctcagctgaactgaacagcaagaggtgaacagtggtgtgtgtgtgtgtgtgtgtgtgtgtgtgtgtctttgtgaatgtgtgtgtctctggagaggtggccagagaaaggatctctgaggtcaaaggccaccagatctgacagacaagctcttgcttgccgtccgtcctccctcagtcgaccctgtacctcacagacctgtgaggccttggactgccccagcactggaacctttatcctgggaaacaggctgctttaggccctgatcttcccatagggaaggagcagtcagtcacagaacctgctcttgtgctgtgagacctctctgtgacatgtgtgggtcagtctgacgcagggagtgtgacacgactgtcactcatggctgaccctcctcctccgtcagcatcaccactgtactggaaatcaggtgacccagttagagcagcctgggtctgtgggatgacagaccttttcagggcctcagcggagacatatatgagtcagggagatgaacgtctggtggttgcgaagggcatacgtgggtgagcctcagggggacagtgcctgggactctgagattcttgggctgtactcactctgcccgaggctggccttgtgctgtgtggttttggagtggttttcttagtctcccagagattcagtttccctcttgccgaaggaagctgcaaccaccatgactgcttgaagctaccctgccccccagcctgacccttccagaaccttccatatgctcttccgtctaaccctgtccatgatgggtggatgcttttgtgcctcttcagccaggggtggggagcaggtttgagtgccttttcttaggcattctctgtttttggctgtggcttgtggcccggctataatcttgcctctttcattcctcttcctctcccccagggttatgccctccctcaccccaaccccacgccatcatgaggctgctcagatgtctgggtccgacctggcttgctgccttattgaatgaacacgtagagtgcttcagatcctgttgggctcacaaggggctgtggaaggccccttgcttgggctgaacctgttagggctccctttctacccaagcacctgcggggagttgatcttccagggaagggaggtctggggtggaaccccagttccgtagacttggtcctgggatccttggtctccttgtctgcctagcaaagacaccaaatagctgctgagctgccaggcagcatagagtagctggaagtatgagggcctgggcacaaggcctgggcagtgtttgatgaacatacccggcaaacactgtcaccgggccgccacccatcacttgctgtcccacaaacccttcagtgcatgacatttattgagggcctcctgtgttccgaggtcagtggtttggagtgggcacactgccttggcagtgtggtaggtgacaagccagagggatggaaggcaacccaaggtagattgtccttccttcatgggggagaccagggcgagtgccacagaaccagcagaaaagagaatgagaaatgggataccaggagccttgggtgcaatgtgggaaggacaagtccagggaggcttttagaggtccagaccaaagccaccagcttatgtggactgcaagaaccacctaaggcaggccacggtcttgccttccatgctcctcagggctgaagtgggtgctcttggtagccctgtgataggtattcatttggagatcagagacccaggaatgaatggaatccaaatgtccttgtcctgatagactgtctatgactcatatacataggtacgtgaatgcatgcgtgtatgtgtgttttcaaactgaacactgttttaagtcatgtgcaaaagtcttgagctggtctctatcctgcttggggcctgagcgattccttttcccagaacagctatgatgtggatgcttctcgcctattagtcacccagggacttggctgtccaatcacagagctgagtccctgtcacctcacctcacctgggtacatggggtgggcatctgccaaagatgctttgggtgggagacacctcattcacaccgtgctccggagagccggtggctgcccctaggaactccttgcatgaccacctactgccaccagtttcttgtgatgggttggtcatttatagtgaaaacagagtccgtgtaaggactggtttggtctgacattttaggcacctctggaggaaggaagggagctcagagggagagagagcctgggcctgctttgctctggctgggcggagagagggtagagtggggtggggtttctgacttgttctttccttctccacttagggtttgcatcctcagctcctctcagctgtgatggctaccatagctcttccctggagcctgtccctctacgtcttcctcctgctcctggctacaccttgggcatctgcagcagtgaaaagtgagcatctggcattttgatgtccatactttccccagtgggaggtcacatcccagattcctgcttcagggaggagatccatctagcctgggaggcaaggtgaagagggacaaggcagtgggacccaagggcaggtatccatcttcctgagcttgcacaggcttctcccagacacatgcagaggctgctgatggggcctgcttggccatggataggcgctctgtgtcttccctttgaaatgggtctggattggggttgtgacaggtggctcagtgggcagagtgcctggcacaggcgtacaagcatgagaactggcgtccagaattccaacactcacataaaaacaagtcaggaatgggctggcaaagtggctcactgggcaaagtgtttgccccacagacttgacaacctgagttcaatttcccagatgctgtggtggaaggagagagttgatctctaaaagttgtcctctggcctctatacacataccatgaccacctactgccaccagtttcttgtgatgggttggtcatttatagtgaaaacagagtctgtggcgtgtgtatctacatacatgcacatgaacacaaacacacacacacacacacacacacacacacacacacacatggcaatgaaatgaactcgaattccttttcttcccagctgagtcccctacctcttcctggggcaggcacagggtgccaagcgcagggtagtggacatatccagaggccatgtatgtctcgtagccagccactcacaccccactctgcccacagactgttcccatcttgaatgcttctacaactcaagagccaatgtctcttgcatgtggagccatgaagaggctctgaatgtcacaacctgccacgtccatgccaagtcgaacctgcggtgagtgtagcctggtctcgccaggacctcagggctgtgggacctccaagctgtggaatcctgcctgggcttgagatccacagtggttagcaccaggctcagacactcagtcatgtgggcccccaaaagtggctgtgatccaggctttagttgagagctagcaaggtcctggaccaggtagtttggggacagtgactgtgagcctttcatgcaaggttagacttcataaaaaggtaatcagggtacttagtgcctgatatattatatatattatacatatataatatatataattaatatatatattaatctggtatttgggagaccccacaggcagctgtggggttacattgcctggggaagtatctggggagccataggctttgtcaggctgactttagctgcctggaggtaagggctctcgggcaggagtggggctgaatttcttggtcactctggctgctgggaggccaggctggggtggggagctggctgcttgcctactgtgctgctgtctctggcacaatggagcctgagaagggtccttggatggctctgtggtcctgacttggtttctgatgtgacttttctgttctgcaagacactggaacaaaacctgtgagctaactcttgtgaggcaggcatcctgggcctgcaacctgatcctcgggtcgttcccagaggtaagtagcctgagtagcagtgtgtgtgcatgtgtgtgtgtgtgtgcgtgtgcgtgtgcgtgtgcgtgtgtgtgtgtggtcaagtccttccagctgtgggctgaggcctcgaggtgggcttggacctctgcaagcatcaacctggtaatgcagaccaggccatctgggctgagagggaggaacaggaagttggattttgaggtgtagggtctgtatccgtgctgccccttcatgagctgtcatccccactctccttgtgagtcttgccacccttttgcatcccagacaacggcaatcacgccagactccggctgaggtctcagcatctagggggtagtggcatgctatcgctgagtgtcccggccctggtgctacctcacaacagctcagtgcctctgggcagcttcagggcctccgtttcccctcccataaaataggaaagaaaatggaagctccctcaaagggttgttcttggacagaggagatgctgagagtcctacgtagaccctgatgattttgtctccttgccaaggaaacatctaagtctcagagagatgtggtaactgccaaggtcacccagccatcaacggctgagctggggttgaccccagacctatgggcttctggtggcttttccatattgttcagctgccgcttgcatattctcaggttcagaccatgtggatgtaacttcatttttttcctcaaaccctctgggcagggcaagggcagggcagtgccagggtttgcctggggagtccaggctgtgttggcaggttcacattttttctcagagaaagagaatgggagatacacaacacagccggtaagtctccagctataccaatctgggagctttgcaggaaactggcctccatcctggtctgattagttcttagctgtgtggccttaggcatgcccctaaccctctctgtgtttcagtcccctgggataactgatgggaatggcaatagtatatgtctgtctcagggggtggtgagagctcagtgaggtaatttatacagagaagaggggacagaagttcccagcagcctcatactggcgataccttcagaccaaccataacaataataatcaagttgtgctacgattaagtgggtgaacctgagctggtagcagctgtgagagatgaaggccgtgccctccatgaagtgagaggatgcagtacccagctgattggttggtcagggaactctaatggtcaggctcaaggctggtgcaggtaggaagggccaggcctcaaggctccgactgcaaaccaccacctagtcccagagcataggtcctaccatggcctgccactgattctcctcctgccgcctacttggaggtagggcgggaggggggacagccattcatctctaagctttggtcattctgaggagccatggctgcaatggccttgtgtgtcatgggtctcagaggggaggaactactgcgctcatcagcaagctgtgagcagcggctgcctggggcacactcagcagctagccatcaccttccagaagagtcagggttattgaacaggtctaacactgccttcactatggctgtccttcttgggggcttggctacttgtatttttcttgtaatggggagcttccttctaatcctggtgacctacttcagtttatatcagggattattgaatgactgctctctgtgccaaacttagctgctgcctgtgtttgtaaataaagttttattggaacatggcccttgagttgtgacagagaccgtgtgtgtgtgtgtttgtgtgtgtgtgtgtgtgtgtgtgtgtgtgtagctgtggagctaaaaacacaacctggctggttagagacattggctaccccttgccttagatagcttggtagaggcagaacatgtccttaccttgacattttaacggttcccctttctcaatgacctctgctctcctcccttgcagtcccagtcactgacctccgtggacctccttgacataaatgtggtgtgctgggaagagaagggttggcgtagggtaaagacctgcgacttccatccctttgacaaccgtgagtatggaacctggtgtgtgggtctgaatctctgagtctgtccctgcgcctacctgaaaagctccccccagctctgaccttcccacccaaccccacccctgcctggaagattcttacttcagctctcgcctatttgtgggtctgtctctctgctgggctgagagcttcctgagggtctctgctggccctgaggctcctctcaggaacactcaactctaggtctgaacaggcaggaagctcttgttgaattgcggagtgtttttcaacctctagagaagagaaggtgcagaggggagatccaggcaaaattcaaattgcagccctgccttgatgcatcaggctggcagatcacatctgggaccttagtgttttctttgtagaatggggataattgaggtccttgtgacaggaaggaatgttgaggtgcataaactgctcagcattcaagacatagggaaaaaaaaactagtgctctgtgggcacacagaatctcaaggttacatgtagagcacttgccaagctgtgccaactcactctcacaaatattaataaacaagtatattgaatgagtgtgtaaatagtataattgagaaatgaatcatagctctttataatttatatttacatttaatatgtatactgatgggatacacggatataaatttatatgagaggctatgtaattatagctacatgttctaattatttaaatttatgtcttatttaaatgtattcatataaatacaaatacatcaataatacagatacatggataaaataaggtacatgagctggtgcctgcacaactctcagatcagttttcgagcagaacaaggctgcctgccaatcactcagcagttgattagtcattcctgaagagtgccttgggtaccaaaagctctattggcacggcacagcccatactcaggcatcctgggaggagcatgggcacagaaggatcccctatagatttactttttcgggtgtaggcagagcaacaagggcaaggggtgtaaggggtgacacatggccggggaaggctgggccatttgagcacaggaatgaggaggagtgggtgccgaggaggaggaacaggggccaggatggagagaagaaggttcaaactgtggtagagtgggctcagaggaaggggaagtaggtaggtatagaggaggaaatagaacaggttcacagtgggatgtgaggaagggaagaaagggggcacatgtggaagagggggacagctgttgcagaggagggggaagagcaggtgcataggagaaggggcagcaggtgcagaggaggagggacagcaggtgcagaggaggagggtcagcaggtgcagagaaggagggacagcaggtgcagagaaggagggacagcaggtgcagaagaatgatagcaggtgcagaggaatgatagcaggtgtagaggaggaacaggtgcagaaaaggaggaacagcaggtgcagaggagaagaagcaggtgcaaagaaggagttggtgctgggggtgttgtgtggtggaaactggtttgcaagttcttggtatcataccgattggtccatgatatctgctccctcctgtcttctgtctgcagttcgcctggtggcccctcattccctccaagttctgcacattgatacccagagatgtaacataagctggaaggtctcccaggtctctcactacattgaaccatacttggaatttgaggcccgtagacgtcttctgggccacagctgggaggtgaggaatggccaagcctctgcctctacaccttcctgttctggtgtctacccttttctgtttctacatgctggtgtgacactgattcagcctggtcctccgacatggcttctcagtgcctgcttggctcatgcttttactgcttggggtcacatctggctccatatctatgtagtccctcgagttaaggcggcctctgagacttggcagccacttttccacattctaattgcagcgtgttccctggctgcaagggatggggtggtggtggtggtgaggaatgacggggactgaggcttgccatctacacacttgtcccttacttgcctggtgaccctgggactcagggccccagcagccagtgagtcagggagcctttgggaaagctggggaagaggctgtttgcttagcctcttgacctcgttgcgggaggcgaggtggaaagtggagctgagctggtacccatctctgcccaggatgcatccgtattaagcctcaagcagagacagcagtggctcttcttggagatgctgatccctagtacctcatatgaggtccaggtgagggtcaaagctcaacgaaacaataccgggacctggagtccctggagccagcccctgacctttcggacaaggccagcaggtacagtgggtggcacaggttgggggtgggagtgggagaagctgggtaaggggaaggtgctctgggagctgcaaatgtgggtcagcctgcttccccctcatctgccagcacctcccgtgggctcacttaccagagacagggatgctcaagacatcagtcacggccatagatggtaggaagattctccttgtattagctctaaattcttagaattcagggtcgggggctcctttttcccagccttccctgcaggacaggtgctgtcctaggcaaggtagctctaccagaaacaaggtaggcatagcctctcagtgtggatactgtggagctgtcatggtggggactcttgaggctccatccctcatcatgtcacttgccaagttcaagggacatggacgctctaggtgtggtgtgatgctcaaaggctgcagatggagaaaaggtctcagtgagtgaggtagggagtcagatcagccatgggctctgctgggagtgccacagggacatagcctttaagaacagccttgcctttctggaaagctgggctggagcaggactgaggatggagcccccagcaaaagcaagcctggctagacactggtacctggcagagtgcgattgttgtccaagatgtgtgtggccttctgaggggccatgcctcaacttccacttctcataccccggacagatcccatgaaggagatcctccccatgtcatggctcagataccttctgctggtccttggttgtttttctggcttcttctcctgcgtctacattttggtcaagtgccggtaccttgggccatggtaaggagacgcctacccagtcttcctttcccacccagtctgtcttcagcatgcacatgtttccaggttggcctgggctgcatcctgttccctcgtatctgccctctctctgtctcccttctcagcagcttccttgtccctgtgcctcatcccacaggtagaagctggtgtgggaaagggaggcaaagctcacctggaagagtcccccgggcacccctgaagcccactggagtccctgtctttcctgttgctcttggtcccctcctgtccattctgactgtgtcacactcttgtctaaccctccttagagattccccaccacaccagtcatacatcctgacccttgagggcttccactggaaactgtgtgccaatcagaaagtgcctcccctttctccggttagatatgtccacgttctgggtagcttagtggtagaccaagtagatcagtagatcgagtagattgtgatgtagggattcaacttcaaactgccattgtgaaatgcacagcgtcgccattccccaggggagtgttcaccaggaggtctctctcctgcctccctctctagcctgtgtagtccctcccactctacagccatcttttgactagcacacaggtctgtgtccacagactgggcaatcctattacatgtttggttcaggtctgtcttcatgtcagcatgtcagctccgggggagcagaggccttctttgctgtccactcatgtgtccccagcaccctgtgcagtgttctctgttggtgactgctcagtcaacatcattgaaggagcgaatgcaggatgggcccatcccctactctaggggctgtggggctgctggtgggacctcatgacacccactacctggtctcactcttcacccctccccctcttccttggccaggctgaagacagttctcaagtgccacatcccagatccttctgagttcttctcccagctgagctcccagcatgggggagaccttcaggtaggaaccaggggtagaaaacagagggatggttgatggacagcccaagagcaggctgcaggggagagatgtgatagggtgacaatggctttgccttctgtgaggaggctacaggatgtgaggcaagcagtttccccatggacaacagctctgtctccgaactgcctgggagccttctgtctaaggcgtgtggccttggctctaatcctggctctgccactgcctgcctctgtaaacttggaggagttacagatcttcccagtgcctcagtttccacccttatacggccctgggagtgttgctgggtgcagtacgggattcagggagctgcagagatccctgcctctgtgaacagagcaattccaggcagatccagtgagcagagtgattcctggcaggcctagtgattcatcacaggaatgcaagacctcaggccatctggactcacaaaacctgggcttgttttcaaactgtggcccacacagtcctatcttctgtccccctagtctacctgcctcaggctagatgcttcttgaggcaagaagtggatagagggtagaggaaatctactgtttctacccccgaccccactgggtttccatgatgggaagcgtgtggggggcagagtgacctgtggcactatgctgagaatgggaggcccacaggcctgctggactggcctgtgaccattagggctgagcagggcccttctagaatatctgagaggctcccagaattgaggatgtcttattatgatacttgatgtgtgtgtgtgtgtgtgtgtgtgtgtgttgtgtgcacacattcctgcatgcttgagtgtgtgcatgtaatggggtgagcagctccataaaaagtttgtccagactgtgttatgggggtgcacacctttgatcccagcactcgggaggcagaggcaagtggatctctgtgagttcgaggacagcctggtctacagaactagttctaggatagtcaaggctatacagagaaaccctgtcgcagaaaaccaaaccaaaccaaacaaaaaagctcaaaccaaatcaaaagaaacaaacaatcaaaagaccaaaataactctgtttttcctgaaatcccttatgcctttgatcgtggtaagatcctgaccaacagacaaatgcaaacaaaccttgaccttgactggctatgggtcagcaaggattcatgtcttagcctctttgggttgtggccagggctctgggtcatgaatctcactcacacacacgaaggttagcctgaggggtatatgcaggccatgacagggaggggcgagctggggatccaccagttcttgaccactgtgtcccttgtccttgctacaccagctgcctgtgacttgagcaggctagaccatcaaggacattggtcagctcattgactctggtcaagacagttgcgattgtccttctgtgttcgcacacctagttcagtccaggtacacagcaggtactcagtagccagccacattcacccctagccaacatcccccagacacaggtgagccagcactgagcctgtgttcatctaggatctgacctagggtgacaagttgagagagtccaccaagacagcaaggctacaagatgatatcaggttgggggcagggaggaggcggtcccgggtggtcctgaaggatggagaacaggtgggagggaagggagaggaggagttgagttcagtggtggggaggacgttgaacgacccacttactctcctcactttctctggcagaaatggctctcctcgcctgtccccttgtccttcttcagccccagtggccctgcccctgagatctctccgctggaagtgctcgacggagattccaaggccgtgcagctgctcctgttacagaaggactctgcccctttaccctcgcccagcggccactcacaggccagctgcttcaccaaccagggctacttcttcttccatctgcccaatgccttggagatcgaatcctgccaggtgtacttcacctatgacccctgtgtggaagaggaggtggaggaggatgggtcaaggctgcccgagggatctccccacccacctctgctgcctctggctggagaacaggatgactactgtgccttcccgcccagggatgacctgctgctcttctccccgagcctcagcacccccaacactgcctatgggggcagcagagcccctgaagaaagatctccactctccctgcatgagggacttccctccctagcatcccgtgacctgatgggcttacagcgccctctggagcggatgccggaaggtgatggagaggggctgtctgccaatagctctggggagcaggccagtgtcccagaaggcaaccttcatgggcaagatcaggacagaggccagggccccatcctgaccctgaacaccgatgcctatctgtctcttcaagaactacaggcccaagattcagtccacctaatatagcaggtggccaggactgggatccagctgcctggatcaggtcaggcttgaggaagactgcttaagaggtctcttgaggacagtccactgctgaggactgtcctggctatccctgccccccccctccaaacttaatcatccacttctgaactccatttgctacttcctggtctaaccagggtttggtggagggtggggagtgggggagcggtggtcagctccactgccctatttagtcatgaggtcactagcttcctgtacctgcctccttccctcctgcttgccttcacagggcagctagaacttgcttcccccaatacaaacataaccttgctcctcatttatccctgagcttgctggggctccttacttccctctgccccatttcctgtctcaactcttgccctgccagcacggctgtggaacagctgtcctcaggttgtgatgtggctgtacactgtcttaaaatcagagcagctttgacaacccaaacgaagaggtcctgataagactgaatgcagcctgttgactatggagggtccctcgtagaaggaggggttgggaagggtcatcagtcatcacctgagatcgtagccactctcctgcaccccatcctcagctattctgctcctggagcatgagttattttatgtgttcttgggcgatgctggtctatgtaaggggtgggggcgcggggttgattgaagtgagggctccttctatgttgctttggggaccttgtctattctggggtgggtttttctgtgaagcagcttctttggggtaacctagcccccttgtcagtaagcctaagagagtcaaaggaccaccgagctggacttgagtgtacgcctacttttgatgcaacatctgggaaaagtactttttttgttaatgtatccttgaagctaagaaaagcttacaccacaaacattgtgtcagcactgtcctttgtggagatctcacgaggatcctctggggtctcctggagtcatgatgtgtcattccctatcccctaccccaccccaccccactcccaaccccctcctttgcaggcactgttcattgtgctccgcctaggtatcaagcttctccatcatctgtaagtcccgcctacctagagggaggggcttctgtaaatcccgcctacctagagggaggggcttatcctataaatcccgcctacctagagggaggggcttctcctgtaagtcccgcctacctagagggagggacttctataagtcccgcctacctagagggaagggctttttttcttaaggcactcagaaggagatgaaggggatagcacttgacccatcttccttatcccgggctgtctcctgacctccctgtgatagactcagtttggacaccaatacctacccagcagtggctgttggatctttccacggctgcctcaccaactcatgaaggagtccactggaacctgagccccgagtcccaacagcccaggcatgctaagtgtaccacctcaccctcagaggagagcactgctctctacagaccactccattagcacagagccttaggtgtgggtcactgttctagggtgatcagatcgtatctcctcagggaagcagagatccagacctaactaatggctgccctacccacagtgcctgccttcgtggtcctgcacactgctcactggctgtcctgccagactacaggaccactggctgactagcaacttaggaagtgccttggcgcagaagggctgtcacagaggccaggcctgatctagccaagtagggtgtctctcaaccagatgtcctgggaacaggtgcttggggcaaggcccattgttagcaagaggagatgagccagtgcagacgggattcagaacccatgcaagggttctcctgcccatcccctcctgccaccggatgctgcctgccaccagcctcctctaactcagcaatgagtcagacctgagctctgcattcacgttcttcactgtgtatcctgggcaaatggacaaaccttcaggattttcttgcctcggttcccaaataggaatacaacttatttccacagctgaaaaggtctgagaaggattcagttctctttcaatgatctgtgcatggcatttttgcaattatttcctgtaaagttttaaaacacattcacctttttgtttgtttgtttgtttgtttgcttgtttaaatgcacttaattaaagattttcctcatatcgtatctgtggcttcaaaacccaatcttcctataaataaaaggtaattatcaaaagcaggtgcaataaaactctgtaacgtgtgaatctgatctgggggtggagcctgatagccgagcactgccttgctcattctgtcccagttctacaagaaagagaggtaatgtcagggtagtgtctatgtcattgctgttggaactctgtcatctcaggctagagactgagggacacttcctctgtgacaaaagcagggctgttgagaacatcttggtcatttataggaaccaggctcctgtgcacagataggctccaacctctctcaaatccacatgcaggcttgggcaagcatcccaacagactatggctcaacctatcattcgtctatccgcctctctgtttctctctgtgtgtctctgtctttctctctctctagccatctaatgatcacctatcaattagcagaatttttgcagagtattgagaaacaatctctagcattcacatatggcagacattgctaattgattttattatgtatggtagacgctaataatcaaatgcacctatgcatggcagacattgctaatcaattacacctatgcatggcagacattaataatcatagccttccttccattagaagctggatgctgccctagattctgtggtactgtgtctggggcagccccaactgatgagaacctagccacatgtctgggtcacgctgcctcagtttccctctacaataggagctcttcccctttctctaggcaggggcagcagatgctgagatggggcagcctgggaagctgagaaagcaatgaacaagggtccccaaagcccaggaacccagaaacccaggtgttcctgtgtctggtgagagacctgagctggcattgtctggagaaaggggtcaccttatgccaggtggagatggccaaagccactgcatgtccaatggagattgtgggagtggagccaggagagagcagctggcagggcagtgcaggaaagggggtgccaggacccccacgatcagatttcggggggaaagcagcggctggagagaaggcccagcccgggctctggagagtcttgggtggggatcaggaaacagttagggacatcttgggctgcaaggaagagacagggctgggggttggggacagaagaaggcttcaggcctctcccaggtcctttttggctaaggttgacctgttcctcttatctccaagtctacatctctgctctctcgtccttgctctcagcagcttccggagttttcaggtaaattgtggttgaataagtttgttcaagtttgagacaaaaatccagccataccttactcattgtgatgccccggccaacagaggaagccccagggaaacaaaagtaaaaccaaacagcaacattagaggcagagatggtagttcattcctgaaccccaacagcagagagctaaaatgcgggatgggggaggtgtctcaggtttgaaggtgactggtctgtgtagtgagctccaggccagtctggactacttgacaagttcatgttccaaaaacaaccaaaccaaaccaaccaaccaaacaaacaaatagcccataccacaccaccctgccccccaaaaaaaccccacaaaacccaccacccaactctctctgtctctacccaaaacaacaacaacaacaacaacaacaacatgtcacctccatgtctgtgagagacaagagcttttgtcccacttttcagatgaggaaactgaggctgagggtagttaaggagtgtagttgctagtggatagagattgtgtgctccaagctcctcagttcctggacctttctaagtgcaaacttgcctggagacgattcctcctcctcctcttcctccttctcctccccccacccaccttttcctcccccccttcctcttgcccttcttacccctcctcctcttcttcttccatcagtttatttactcatccactttacatctggggtacatggggtgcttcttggagacacttctaccaaaggcagaaaaccagaaagctctgtcttggcctctgggtagcagccttgaagaaagaaaaagatgaaaggcccacctcactgcaggaggaagagaaacccttcttctcactgctccactggccagggcatggctgccagtcaggtgaggtagtcttgaactccaccctccccttcatgactggagcctccttctctccaaagcctcctacctgaaacccagcatcccgcagtccaggcaccagcagcagcagcagcagcagcagcaacttcatcctgctcaacctgttccctagcccacctgtctccataacccatctgtctaccaggaatgtccattttgatattgcaacatgatgccatctacaaaatccaccaagaaccaagtagagagagagagagagagagagagagagagagagagagagagagagaactcacataatgtggttttacttaaaacatttctgtgttggtgatagagctgtcctgcatgtagccatgggttgccagttgggagactcaggacagcttcactgagagccacatgtggccgccccgcatcctggtttgactccagaaacaccctgttgtcatcagggaagactggattcttcaatgtcactgtccctgaatgtggggaccctggcgagctgtcatcagctccatgcccctgtgcccacggggtgtactaggtactcaaactaggctgcttccaagtagtccctcagtgctcacagtctgcagctcttagtaccacttggaaggtgacaatgctgaggccatgtgtgttactttcagggctggaggctgaggttgagggtggctacaaatagaaactagaaagaactgatttccattgtcacctgctgatccccagattgaaacagccctcgactcaagcaatccacccacagactcctacagatccttcagaaccccatttaagaactcccacatccaggaggccctctgagtttcccctccagaattaagacagttcctctgaagaatctctgctccaagtgttgccgtgtgcgtgtgctctagccttacatccgtgccctttggtttgctggtttgcttctttcatcccattttacacaggagacatgaactcacagtgttttgatggctcacttgagatcacacagctagaacactgaagagaaagcctgtgaccctgggtgatctgtgacactgtcactggcccagattgtcagtgttctttaaagcctgtgccaacaagtatctcagactatgtgccaagaacctatggtgacagagtggcagcttctgagacctaagaggctgctgccacatcccatgccacagggagtttagtgtagagacagagcaatgctgaaatgtaagctcactagaagctcatagcctgatgcctgtgtcagccctgggacagcccctctgctgacattttccgataccagggatgtgacacacccactaggggccttgagaaagcaaagcaggaagccgcctgagacctggggtgcaggatgccaggaggtacccttgattccaggaaaccagggcactgaggggagggagcagctggtgaagaggccagcttctccgcccctctgtgcacctggcctctcatgggcatgcacccaggcacacagctgtaaatataccataggtgctggccctgggactggaattgtccacagagacctcagccttggggtgagagagtaaccatggagggcacagacaggtagtcatcactcgccagcctgtccccataccttgcacaagacctcattaggaagcacaagcagactgcttggctaggagagaagatgctggaagggccttcgcgggtgctcagctcagatttagcgagatgaggaagcacttgacagtgagaaataacaaagctattcatgtattcattccatgcttgtttgtgaaagatgatgacatgcaggcagctacagggtgagcaagggaaggaaagtaaatgccatctacctgtgtagcccttgatggccgggacagagagagagagacagtggccctagccttgtggagttgggcagcctatgcaaggttctggcttcactgccagccagctgtgaccttcctggatgccaaagcttctttgtgcctctgtttccttattctggtgataccagggctgtcatgaggataaaataattaagtgtatatggtgtacttagaagagtgctggtagttggagctgtggctggggacaggactgtaaccgggtggcccagtgatggtgggtgtgggagctcccagcttgctgcttgctgttggtgctcttgtctgccttgcagctcttggagacaggcacatggcctctgctgcccctctgcatgcggtctctgttgcccctcttttcccttcctaggctcctcctcctttgtacatctgccccaagcatcctgaagaagaatcctaagtcttcttatgattctagtggcctcctcctcctcttcctcttcctcctcttcctcctcctcctcttctcctcctcctcctnnnnnnnnnnnnnnnnnnnnnnnnnnnnnnnnnnnnnnnnnnnnnnnnnnnnnnnnnnnnnnnnnnnnnnnnnnnnnnnnnnnnnnnnnnnnncttcttcttcttcttcttcttcttcttcttcttcttcttcttcttcttcttcttcttcttttcttcttctccttcttctcaggtcggccatcttagctgccaccagccttacttggggtcattgtgcccctgctaggtctgtcccattgagactcttggagccttagttttcttgtctatgatgtgaaatgagggaagcaaaagaaaaaaagtcttgtttctatgcttctggtggaccagaaggctaatctagaatctcagaaggaggtggaggtcccccatcatcagaacattcccccctcttttacctcccctgctcctgttctcaacattcaatgtccaggggacttagagacaatgctgtgtttttgtgagcccacctgaggccagcctgacatgcaattattgatcagtaactcttgctgcaagcagttgaccttcatactagatgatgagattcgaaggagctgggacatcgttagatgctcttggtggtggtcaagtccggccattgagtaggtgacctgctgatggatcctgtcacctgctgcagtatgggtctgaatgaggctccaggagcagagctagctggctggcaagcagattctctcactgtgataatgatgcttgtgcaactgggattccacacggagactggggagaggagacaacatcactagggctcagaaggatggcagtgatgagcagtggccacatagaaggcactggctccgttcccaggtcctcccaccatcccctacccctgctaggctttcagctattgggtctactctatgtgagaaacagttgcgggaacagaaaagagggcatgtggctaatagaaggcgaagcctccttggagactgagtgcggaggatgctggccgggtcacctagggaaaagagccaagcctggagatgaacagtctccagtggggctctggctgcagattgtaaagatcaacaacaagaaaatgctggctattgaaccctgatcccttggacatttggaaccatctgcctgaggcccgtgtgcccagctctgccagcagccaccagaggcaggaggaagctggaggggtgcacacccccatcctggacttgctatggctcgattggagacgtctggactttagaactgagatggaacatatactactgttctaaaccattcttccgcaaccctctgtctcagctccatcttcccagacatatatctagatagtgtctggcaaggatcctggatccctctcctgccttcacaacagaaggtttgagagaggctcgaataattaggagtcttctccctgctgtaagagcacgggagtgtctcccagtccaatgtatggagatgcctgccaacagagcgtgcctatgtagaacacgtgaataagacccaattaggaaacctaagtgcacataagtgaaaatgttatctgtcagctggctgtgctccctctcctatccagataggactcatgggtaggggaaaagaagttctttggtgctggccattctgggccctgtagtcctcactagactagtgaacctaaaggcttactttaatttaatttaattcccagctctgagcacgagggacctatggctctaacctttggaaactagacacttggacttgaggtttgttgctctgggttttaaccaccctggtacttggcagctattgtaataacgcttcaccttcagcaacagtacatagcaagaaaaagcacccgttggcactgccttctcttacagctcttacgcacgccttggatgctgggaccctcgtcctataatgatgactgttctaggcccagagtgtgaggctcctcagccatgacaattgaactacggtgaataagatactcggtctccattctgggcagctctcttgaacgtgctcagtgatcaggcctcgtagcttctcctcttcaggtctttacatcttacatgggctctgtgactcttactggccatcagttctgctccagccactttctggaacatctcagctgtcccctggctgctcttgccatggttgttccttacggctgcagtcacctggaggctgcctttgctgctgtcccacgatcctctcctggtgtcatcagccaattccattaatgataaggatcaaatatcggcaaaaagaaaccactcaagaaaattttattggatttaatgttaaaaaaaaaacccggggccaatcagggaagtatctccaggctggcggaagggagctgaatagccaacttatatagacgagaagtgagtgtggtagtgatatttgcaacaattgtggcaaacttttatgcaaacaaaggactgtctttggactgatagcaggccttctgctgcacggtttggggaggtgctatccctctggcccgggtggaaatggctgcagggtcatctagagttcaccaagtccagcccaaactgtctgagacagacccggtggaaacaatgccttctagttccttctgcagctgaccttactcttcgttagcaagcagctgtactggccaggtaacttcctccaggtgtccagggagcatttaaattgctggtatgaggacagtccagctggctgtttaactgggaatcctttgctcaagatggtcaggacatcatagaagcatttgacatctgtcactttgggaattaaattatcctatgctccaaatcttagcttactaagaggaaaaaataagcattgaaaagggtgtttatcatagaatcttaccatcagtgacttaacaggaacctgctacatatgtaccctgccatgagtggcccctggagatgctgtgctgcacacaggcctggaaggggcaccccgccgcgcgtgcactgggaagacgctgactactcatctggtgaagtgcacaacatatgcccagccctggtttgtgaggtctgggtaagtttactgaggctgttgagactaagcacaggttctcagcattggaaacatgtgcctcccaaatgattcaggctgtgagttcaagatcaaggtgtccgtgggtcgctgcctcctggagctggaggagaatctattctaggcatcaccctggaatccagtggttgctaacctgtgtgctgtccttgcctttacagatagctaatcttgtctctgccttcacttgcattttgtttgtttgtgagtgtgtgtgtgtgtgtgtgtgtgtgtgtgtggtatgtgcttgtttgtgtggtgtgtgtgtgtctgcctgcctgcctgcctgtctgtctccaagtccctctttttataaggactccagtcatatatcattattgtccatcttacgactttctgccctcaacaactcaactctgtcaagcctgagatggcagtctggggttgtgacacatcttggcagcaggcaggaagacttggattttaaccagcctgactctccaacctctggattgacttttgtcacctgattaagttgagtgccagggcctgtatctgccattctttgtgcccgcccctacctatagcagccaggcctgtgagtctaggggcccaggagcctgacaactagtagcactgtaccatacagagtcccaggagcactgagacccttgtggcatctatgtggaagtatgcccctattgtctctgctgtggggacaagcaaagagaagcagaggacgagggagggccagacaccccagccatggctccagcctctgagatcttggggatcttatatccttgccgtcctggggtcagcccctcccccaggctgagtggatcaatggctgtggtcaccaggtgcagaggccaccaattgtgcaagatctttctgagatttttcagctatcatcctgcctgggccaggggccaggccacttggtagttcagaggacaggacagggcacagaagaggggctcagggtgcctgtgtcccagtggtatatggacttcgttcccatcctgagctcctgttcctagtttgcagtgtggaagctggagattgggagagagtgaggagaaggtactgggctgggaattcgtgttgagggaagaatggaccctcacaggtcaagg

SEQ ID NO: 279 - DNA, 2651 bp, Mus musculus
agcaggagatggccgtggacccaacctccagcaggactgcagggaacatctcgacacaactccatgttgcagccagggtttgcatcctcagctcctctcagctgtgatggctaccatagctcttccctggagcctgtccctctacgtcttcctcctgctcctggctacaccttgggcatctgcagcagtgaaaaactgttcccatcttgaatgcttctacaactcaagagccaatgtctcttgcatgtggagccatgaagaggctctgaatgtcacaacctgccacgtccatgccaagtcgaacctgcgacactggaacaaaacctgtgagctaactcttgtgaggcaggcatcctgggcctgcaacctgatcctcgggtcgttcccagagtcccagtcactgacctccgtggacctccttgacataaatgtggtgtgctgggaagagaagggttggcgtagggtaaagacctgcgacttccatccctttgacaaccttcgcctggtggcccctcattccctccaagttctgcacattgatacccagagatgtaacataagctggaaggtctcccaggtctctcactacattgaaccatacttggaatttgaggcccgtagacgtcttctgggccacagctgggaggatgcatccgtattaagcctcaagcagagacagcagtggctcttcttggagatgctgatccctagtacctcatatgaggtccaggtgagggtcaaagctcaacgaaacaataccgggacctggagtccctggagccagcccctgacctttcggacaaggccagcagatcccatgaaggagatcctccccatgtcatggctcagataccttctgctggtccttggttgtttttctggcttcttctcctgcgtctacattttggtcaagtgccggtaccttgggccatggctgaagacagttctcaagtgccacatcccagatccttctgagttcttctcccagctgagctcccagcatgggggagaccttcagaaatggctctcctcgcctgtccccttgtccttcttcagccccagtggccctgcccctgagatctctccgctggaagtgctcgacggagattccaaggccgtgcagctgctcctgttacagaaggactctgcccctttaccctcgcccagcggccactcacaggccagctgcttcaccaaccagggctacttcttcttccatctgcccaatgccttggagatcgaatcctgccaggtgtacttcacctatgacccctgtgtggaagaggaggtggaggaggatgggtcaaggctgcccgagggatctccccacccacctctgctgcctctggctggagaacaggatgactactgtgccttcccgcccagggatgacctgctgctcttctccccgagcctcagcacccccaacactgcctatgggggcagcagagcccctgaagaaagatctccactctccctgcatgagggacttccctccctagcatcccgtgacctgatgggcttacagcgccctctggagcggatgccggaaggtgatggagaggggctgtctgccaatagctctggggagcaggccagtgtcccagaaggcaaccttcatgggcaagatcaggacagaggccagggccccatcctgaccctgaacaccgatgcctatctgtctcttcaagaactacaggcccaagattcagtccacctaatatagcaggtggccaggactgggatccagctgcctggatcaggtcaggcttgaggaagactgcttaagaggtctcttgaggacagtccactgctgaggactgtcctggctatccctgccccccccctccaaacttaatcatccacttctgaactccatttgctacttcctggtctaaccagggtttggtggagggtggggagtgggggagcggtggtcagctccactgccctatttagtcatgaggtcactagcttcctgtacctgcctccttccctcctgcttgccttcacagggcagctagaacttgcttcccccaatacaaacataaccttgctcctcatttatccctgagcttgctggggctccttacttccctctgccccatttcctgtctcaactcttgccctgccagcacggctgtggaacagctgtcctcaggttgtgatgtggctgtacactgtcttaaaatcagagcagctttgacaacccaaacgaagaggtcctgataagactgaatgcagcctgttgactatggagggtccctcgtagaaggaggggttgggaagggtcatcagtcatcacctgagatcgtagccactctcctgcaccccatcctcagctattctgctcctggagcatgagttattttatgtgttcttgggcgatgctggtctatgtaaggggtgggggcgcggggttgattgaagtgagggctccttctatgttgctttggggaccttgtctattctggggtgggtttttctgtgaagcagcttctttggggtaacctagcccccttgtcagtaagcctaagagagtcaaaggaccaccgagctggacttgagtgtacgcctacttttgatgcaacatctgggaaaagtactttttttgttaatgtatccttgaagctaagaaaagcttacaccac

SEQ ID NO: 280 - protein, 537 aa, Mus musculus
MATIALPWSLSLYVFLLLLATPWASAAVKNCSHLECFYNSRANVSCMWSHEEALNVTTCHVHAKSNLRHWNKTCELTLVRQASWACNLILGSFPESQSLTSVDLLDINVVCWEEKGWRRVKTCDFHPFDNLRLVAPHSLQVLHIDTQRCNISWKVSQVSHYIEPYLEFEARRRLLGHSWEDASVLSLKQRQQWLFLEMLIPSTSYEVQVRVKAQRNNTGTWSPWSQPLTFRWADPMKEILPMSWLRYLLLVLGCFSGFFSCVYILVKCRYLGPWLKTVLKCHIPDPSEFFSQLSSQHGGDLQKWLSSPVPLSFFSPSGPAPEISPLEVLDGDSKAVQLLLLQKDSAPLPSPSGHSQASCFTNQGYFFFHLPNALEIESCQVYFTYDPCVEEEVEEDGSRLPEGSPHPPLLPLAGEQDDYCAFPPRDDLLLFSPSLSTPNTAYGGSRAPEERSPLSLHEGLPSLASRDLMGLQRPLERMPEGDGEGLSANSSGEQASVPEGNLHGQDQDRGQGPILTLNTDAYLSLQELQAQDSVHLI

SEQ ID NO: 281 - DNA, 93568 bp, Homo sapiens
tgacccaggctcagaatccttctcttctcccagccccaagaacagggaggagatgctctgaacccagccagctggagaagccacggcctaggggttccttgctacccttggcttcacccagcctggcactctgagcccgctgcagccccaggtccttggggcaggggtagccaggcgtgctcagaggcgtttgtttggatttggggtgccttcccttcccaggagctttgcacatcaacagtgacatccatatagggcagtgcggaccacagctcccattggagggaggaagtgcaggcccagtgtcagggatattagaagaagggcttctcctctgagagatttatcttcccttcagggttttctgcagggagaatccaaggacagccaggagccaggggattgggggatcattaggaagagggggtgcagtgggtggtccagaccccagaggaggctcctgcatccagcctggctctgcctgggcctcctcctgagcgtggctttcctcagtggggcctgacattcccccttggcactgggcttggtccactgaaggcttctctggttcatttgatgcctgacactgaggcagagctcgtgcctgtgcggaagtgatggggcagaaagcaatggggagggtccaaagctggctggagactccacaggggaggggatcagagtctcgcaggggagcccagaggagccccagcttcttctgcgcaggcatgggatgagaaagacactaagaaagcacctggagtgcgggggggctcttgcttatgctgcaaatcccttctgaaaatgtccccttttccaggcagctggcccctccagccagggggagggactactcttggatagcatctgctaagtgaattgtaaagttctccaaccccagccggcctctggggagaaggggcctcagccacctgccccccaggttcacagccaaccttcctgggcagggcctttgggaggggcacagtgggatggcccaggctgagggggcacctaaggactctgactcccaggggaggggacaccccaagcctgtggttcttaactccatttggaacctgaagaatctgataacagatctgacattaaccttcacctggagtttagggcgttcatggatcctctgaagttcatctagggagcaggtttccaggtgaaggtcctgtgatatgaagcagtgtttttcagatgtgagggcgagacctgttggtggcaatgcaacccacttcacagggccctgccagctggggcctcacatgtagaaaggaagggcaggtatttgttggtgaaacagtatgacttcatgccacacaccacaccctcactccacgatggagaatgatcacctcacctccctgagcctcagtttcctcatctgagaaaaggggataacacgactcagccttgcggggctgtgcggggtgaatgagatggtgcgtgctaagcacctcccatcttctgaaatctctcagacgatgggaggatgggcgtgcagcaggtccccaggttcggcatgatgggagggggcagcacagagaaagccattctctgctgtgaccgagctgtttttccttcccccaggcaaatagctgactgctgaccaccctcccctcagccatggacatgcttcatccatcatcggtgtccacgacctcagaacctgagaatgcctcctcggcctggcccccagatgccaccctgggcaacgtgtcggcgggcccaagcccggcagggctggccgtcagtggcgttctgatccccctggtctacctggtggtgtgcgtggtgggcctgctgggtaactcgctggtcatctatgtggtcctgcggcacacggccagcccttcagtcaccaacgtctacatcctcaacctggcgctggccgacgagctcttcatgctggggctgcccttcctggccgcccagaacgccctgtcctactggcccttcggctccctcatgtgccgcctggtcatggcggtggatggcatcaaccagttcaccagcatattctgcctgactgtcatgagcgtggaccgctacctggccgtggtacatcccacccgctcagcccgctggcgcacagctccggtggcccgcacggtcagcgcggctgtgtgggtggcctcagccgtggtggtgctgcccgtggtggtcttctcgggagtgccccgcggcatgagcacctgccacatgcagtggcccgagccggcggcggcctggcgagccggcttcatcatctacacggccgcactgggcttcttcgggccgctgctggtcatctgcctctgctacctgctcatcgtggtgaaggtgcgctcagctgggcgccgggtgtgggcaccctcgtgccagcggcggcggcgctccgaacgcagggtcacgcgcatggtggtggccgtggtggcgctcttcgtgctctgctggatgcccttctacgtgctcaacatcgtcaacgtggtgtgcccactgcccgaggagcctgccttctttgggctctacttcctggtggtggcgctgccctatgccaacagctgtgccaaccccatcctttatggcttcctctcctaccgcttcaagcagggcttccgcagggtcctgctgcggccctcccgccgtgtgcgcagccaggagcccactgtggggcccccggagaagactgaggaggaggatgaggaggaggaggatggggaggagagcagggaggggggcaaggggaaggagatgaacggccgggtcagccagatcacgcagcctggcaccagcgggcaggagcggccgcccagcagagtggccagcaaggagcagcagctcctaccccaagaggcttccactggggagaagtccagcacgatgcgcatcagctacctgtaggggcctggggaaagccaggatggcccgaggaagaggcagaagccgtgggtgtgcctagggcctacttcccaaggtgccacaggcccatgatgggatgttgaggggcctggactttgatgctattgctgccaggtcttgctgtgtgaccttgggtaggttgcttctactctctgggccttgttttctcctctgtgactcagggataggagtcatcagcctggatgagctatgtcagatgagaggtttggagggcactgttgctgggctgacctggctgagcaggcaaaaggtgggtgcagactggcctccccccagggatggagtgtcttggggcatcaactagaatcttggccctcagagggataaaccaaggccaggatttcttgggctcagagtcaggaacacaggagctgctgggggctgggctggaaacctaaacagaagaaagcctaacccggtgggaggagtggggcagaaatggtcaggccccagatcagctccctcccctcgactgtgaggccttggaccagctctgctcctctctaggcctcaggcttcacctgggtaaaacccaacaacctctacacccttttggcccaggcagtcaatgctggaggtcctgtgctcctggacgggaagagcaggtgaatttcctgctcatggaagcgaatgaagtccagcttcagggtctctcactgcctgggcttttgcaaggccctgcatctacttttgtacttgtcattttgtattcgttttcttaaagagggacctcgaactgcataagcttaggccacccaaagcctggctctgcccctgctgaggtcagccacccaatccccaaggaagctcatgttgggtcttatggctggagtaggggcccccgggggttcccaggtcttttgagggcttccaggcacctccttgtaggaagggccatccctgttcctctccttgtgacccatattctcccttcctggagaccgagacagggacccagcccatgaggactggcatggaaaggcagagtgtctgaagagcgctgtgaggagaaggaagaggaagggagaagaggaagaggaaggagaaggaagaggaagacaagggggaaaggggaggatgaggagggggaaggagaagtacagatctgtttcctggagccgtctttggcccccctgggctgagctcagtggtagcatctgtgaacctgagttgccgacaacagccccacccaaccagtactgagggaaggacacgatcagggtggaacagccagggtgcaatggcaaatgcacagagtacagacaggcacagggcctgcgtccctgaggggcctcagagtgctgccaagagggctcaggccttaataaagccctagggtggagctggctaccagggacattgggaggactggggagctccctccccatgctctatcatcctggagactacaggtcgggaggcccagggaagacaagaagaggctgaagtgggactgtggagggggaccatggggagcagccaccatccaaggctgggcctagactccctcccagagatggtccctcagagctgtggtgaggctggccctgggagggtgagacccccggtgaaatccttccgcttccccaccccttgcagagggcaggggtcctcagggaaagcacaggaaccagacttttggagacttggatcttcagcacacctcagggtcctgggctggcattggccttccgggcctcaatttccccatcaacaaatggagatgaatcccagcttggctgcctcctgggatctaacgagaaaatgagtcatgtgaggtaacttccaggctcactgcaatgggtacggtggggtgtatcagattataaagtgggggtgccctcctcacccccaggcttggcctatacccccctctccatcaagtggcctctctgtgtctgtcctttggggtgaggacactgtaggccatgagaaatgggcagttggggggtcagaggccaagggttagggaggcagggcttggtgagagtgtgggaccatcagaagagaaggaagtttacaaaaccacattttgtgtggagatggaggctggaggcccggccctgggacttggtctggggtttcttgaggaagatctgagggtccaagggaggaaggatgccctggccttctggccttctctggctgatcctgccttcttgctgcctaggacaggagagtaatgtcctagaatggtccctgggaggccagttaggaaaccctttgctgcttctgtctctagctcttgtcaataaagacggtgacacctgataacagctgtggcctgggccaatttctccgccagacactgtgtcctgatgggtgtgaatgtgtaggtgtgtgtgggctccgtgcaccctggcctgttcgggtgtgacctcccagagtccaggtccttcagggaacatggaagatacccttgatggggctgagcccacatccttatagaccttgatccaaaagcagtagatgtcctttctccctattatccaaatagcagatttcagggaagaaagtggattggctccaactaggtcacatgatggtcccttgggccaatcaccaaagacgtggtgatagggtgccatggttggccaggtgcgggtcatgtgcctacatttccagccagagagaaggtagggcactgtgatggacactctggcctggcctgtggggcaggggtgggtcagggacagcctactaatggctaggggaggtgggccaggcaccagcaaccaacaacatgcgggtctgggtgtgtgtggggtttgctgtgtgtggctgcctttgctgggtgtgatattgtgtgtccaggtttgtgtgagcccagtgcagggtgcacagtaggtggtcgggacatcttagctgcgtccgtgagtgaatgggcactgaggtgtgacatgcggccggtgtgcaagtggtgggagtggaggaactgctggggccccagcgttgggtgggagtggctgcctgggtagggtccctcacctagccccggcagcccttgcttccccaccacactgggtgtccccgcctgtgcatgctcacgtgcagcctgtgtgtgcatgtgcttgtccccccacacacgtgtgtctggcagccttgtgttccccgggcctggcagtgctgccgtggcctttcttaggagtatctggaatgaatgaacaaagggggccactgcatgtcacaactgcagggggtactgtacacgctgttcctgtaacctcctgtgaagctacagcatggtgcctctgaataaatgagtgataaggggcaggggtactgaaggagcttgtatggggttggggctagaatctgtgggttaggggagccattggggctgtagggtgaggggaggctctgcagttgtgagcaggagcagggagggaggagtgatgataacgcaccttgcccactcctctcctcctcctccagccattgaagttgctcagaccagaggctttaccttgaacttgtctctcagaggcggttgccaggcaacagcccttggccaccaggctctggaccaggacttcctgcatcagcatcagcattatcagaggggagctgggaacccgcagggcctggggcaggaaagaccacggcccccagatctttgggatcctctttacctagaagcgatggggcaggtgaggccactgacccatgggagttgacagctggactccacaggactccacacagaagaaaacacagcgagcggtcgggctcaagcctgtaatcccagcactttggggggccgaggtgggcagattgcttgagctcaggagttcgagatcagcctgggcaacatggtggaaccccgtctctaccaaaaatacaaaaattaaccaggcatggtggtgcatgtctgtgattccagctacttgggaggctgaggtgggaggatcgcttgagcccgggaggcagaggttgcagtgagccgagattgtgccactgcactccagcctggatgacagagggagaccctatctcaaaaacaaaaccccaaaccaaaaaaacccacccaaaacaaaaaaaacacggcgagaaggccaggctgtagtgtgaggggcaccccctggaggtgtgcaaggccaccatccctccaaggcctcagggtactccctgtctctggcaggccctggtgagcatctcagcaagtccactggagggctgagggagaaatgtctccctgaaagtcatggggccaaagtcagcaggcctgggccctatgtctcccgcagcaaacctactgtgtggccttgggccatttatttcacctctggatgtggttcacttagctaacaaaggcttttctgagcaccagctgtatgcaaggtcctgacatgcggctgggggccagtgcaggcaaatggacaggggtcccgcactctcagcactcacaggcaaccacacaaggaagtgtagccctattttgggggctcagtggggagggagaagtgcagtgtgctctgggagagcactaggagggttgggggctggtgggagctgcatctagagtggaagtttcagcctaagtgtgccaggcagaggtatctgcacgtgctaaggccctgagctggaggaaggcagtgagtgaaaggaagaaaggtagcaaagaggcccctttttagggacagagaatgtgtcacacagggcttcctagggcatccattcctgttaaggctgaattctgtccccctctaaatttctatgttgaagtcctaacctccagagcctcagaatgtgacctgatatttggaaatggggtcatcacagttgtaggtagtgaagaggtcatactggagcagggatggcccctaatccaatacgactggtgtccctaagaagcggggaggccaggcacggtggctcatgcctgtaatcgcagcactttgggaggctgaggcgggtggatcacctgaggtcaggagtttgaggccaccctggtcaacatggtgaaaccccatctttactaaaaatacaaaaattagtcaggcatagtggcatgcgcctctaatcccagctgctagctagggaggttgaggcaggagaatcacctgaatctgggaggcagaggttgcagtgagctgagatcacgccaccgcactccagtctgggcaacagagcaaaactccatctcaaaaaaaaaaaaaaaaaaaaaaaaaagtggagattcagacacagacaggcacccaggagggagacgccatgtgaacatgaaggtaaagatcaaacaaggcatccgcaagccaaggaacgccaacgattaccagcgcagcagaagctaggagcaggcctgaaacagctcttccttcccttgcagccctcagaaggaactagccctgctgaggccaagcctggacttctacccccagaactgtgagacaatcagtttctgttgtttaagtcttcccagtatgtggtgctttgttaaagcaggcctagcaaactcaaaattcctacttgcaaaatggagataatggccccttctctcctgggtctcccagaggacctgttgggttaacccattcattccttcaaactctccaacaaggtccagagcttggtggccaagggctgttttgggtctgagccagatccaaaacacagttcctagtccagggcccatagtttaaaaacaaaactatgaaaatgggggctgagtggacgggagtgatgctgggcgtggggagagctctgaggccactggtgtccctggtggccatggcagacaacaccctctgggaagacccaacaggcagagggcagcccaggccccatggggaccttggttcctccccagaatcccagcaggcctccagcaaacctcacagcagcgtgcaccacactgaggggtgaatgacgggcacacatgagtgcacacctgtgtgtggagggtgagacaaaccttcattttctcataggctcaaaaaaagtgcctgggccggctgggcgcggtgactcacgcctgtaatcccagcactttgggaggccgaggcgggcggatcacgaggtcaggagatcgagaccatcctggctaacatggtgaaacctcgtctctactaaaaatacaaaaaaattagctgggcttgatggtggcacgtgcctgtagtcccagctactcgggaggctgaggcaggagaatcgcttgaacccaggaggcggaggttgcagtcatcggagaacataccactgcactctagtctgggcgacagagcgagactccatcttaaaaaaaaaaaaaaaaaaggtgcctgggccacactcagggtcccctggggtcccagacacctcaggttctggctcacactctcctggaacccacatcctctgtcaccatcttacaggtggagaaactgaggcctacggtggggtggggtgtatcggatcctagcaggggaagagctgggatgtggcctctccaccctcctgtccgctttaaaggccagcaaatgtgtcaatatttgctcaggggaactgctggctcaacaggccccagagcctgcctggtgtctccctctgtaagatcaggggttgcctctgagctccagccaggaccctgcgcctgctcttcagaagggaggggctctccctgttgggccttatcaaacggcagctgccagagggagaacggaacaaacgcacgatgcccattacgtggtcggcagtgaaaggtgagctcctggccacgcaatcgggtttgaaccccagcgccactgcctcttagcgctgagtgcctttgagccagcctcagaacctctcgtagactcagtttcctcatccgaaaaaatgggctcccacgcccatctcaaaagcctgtcgcagggctgcggggacggctggagcgtggctctgtgctccccaggcccggcagggggcgccgcgggtcctcaggcctcgcccagtagccgcgtggtatccgacccgcagctccgctcggctggactcgtctctattcggcgacccttggctccactcggccaggctcggctctactcggctgtattcggcagcactcggccagactcggccttgttccgatctgctcggcttcgccctacgccggaagtgcaaaggcagtttcccggcgcggctgtggctccgccctccgggcgcgaggcccgggtgggccagagaggcaggtcctcgtccctcgggcccgtggcgctgtcgtggatgtaggggttccgcttgcctgggccctgggctatgcagagggagacacgaaccagggtttgagggggaagcgggtggagagggaggggctccccgagcctggcgtgggggcgtctttcgccttcgttttgcagggagaaagggagaggttggcgccagccgcacgccccagcaggcaggctctgccactgttctgtcgtgtcgggggaggaagttgctgcccctcagtgtccctgagtctcggtttcccctccaacaatcagcaggtttcccgccggggcagagggcctggcgcggagctggcgctctccagactcagtttccccttttgtaaaacatgacagcccgcccaactccgctgaacacctttgggatccgacgtcctgaaagcccaggacggggaacctggttccggagagcgaaactttccccggcccctgggcgggtcaacgtgggggagtcggtagaaccaggcccggggctctcctcgtgggaggaagccggtttgtgtgtggggggtgggggttgctgcggggactgcgggggtttggaggaagaagcgagtgcatgggcgccctggcctgccccaaagttccctgaggggacgggctggtgggacgggcgggggccggggaccggggagcggggagcgtcccgggttcccgggcgcgggggctctgcccagcaggaggcgctcgcgtcttcctttgttgaaattgatctctgcgcttgaacagttagatctgtgacttgccactcagagcctacatagcggacgccaggaatcatgtttactgtcctgtctccctttttgacaggcacacattttattttttaaatacatgaagcgcgccgtgctttgtaagcgctgactgaatgtgcctattttcacaccctctcctgaccctgggctggaacgtgggcgagtgcaggatggtggccaggggcttggctcttggtcagtatgtgcctcatctatctcgtctgtaaaatggacagacgaggtaacacgtgtgcctacctcagagcattgttggaaggattagaggagtcaagatatggaaggcccacagaatggttggggagaaaagccagcttctggaggcaggggaaagggtggggagtggctggggaagcagggcctgtaccctgggtttctgcattggggttactcctttgctgctgggagtgatagcagggtgatgagagccaccctgggcctgcgctcctcctggtcatgctgttgtcctgggtcccagggtgcctgggaaagggcacacagctttactgatgggtggccagtggggagtgcccccatcgggcattccaccagtcggccccgatggtcctggcctcctcatgtttatctggcccagggacaccaaggctcagagaggtaaacttgcccgaggtcacacagctaggagggggagctgagtcatcacccaggtttgtctgccccagggctggagctctgttttcaggccacctgaccagctgaggagatcgtcagaaaggctgggacaccaacggatgacgcacaaatggaggaattttcaggcacggtcaaagctaatgggagggaaaatactgaagtgtaatattccagagttctctcttgtctgctctgactcctgccagctgccctgcacctagagggacaggaggctcttctccggggcattgcatggccgggagccaaatgagctggcaccagaacctggtgagttgcctggcttttcagacctcagcctcctcacctgtgaagtgggttgaacagctcttctctgcagaggagctgttgagggcggtatggaacactgccaggcacacagttggcccttgacaaaaccattgctgtgtccccagcctgtttctccccaagtcccattgatggttctctctatccctgtttcctcagaaggtcaggttttctaagcccgaaggcttggagccaggcaggagctgtctccctctccagtgctgccgactcaacccttttcccttagaagcagggagggaggctccccttggctccctccctctgcagccctggctctgcgccctgggaatgctgcctggggcagggccacgtagagagcagggccagtgcaggcctttgggtgttcccagtggccaaagtcctttagtctgctttcctttgggcccccttgcacccctgaatggatgacctgggggattccaagtcggtttgggaggggtgacagcacaaggctggaggttgggagagtctggctgtcatcccagcttggattgtagtctgccatgtgacctttgggccaaagataaatcctccctgggccacagtgtccctgctggtcagatgaaagaatcagatgagatcatttctgaggatctttccaggcttcatattcttctgtttgattatccccccaaataaattggaaattggaggcccaaggatgagccctggttgaggacgcagagcccaggggccgtcccatcctccacacttggcccagctgtgagtgggggaatgggatttagcacctgaagccccagatttaaatatatccccactccccgccggggtccccgcactcctgcacctccctcctcccaggacggccctgacctgcaggcattgttccccgcccatgcccaagccccgagggaattccatcgggttggagagtcttcccttctgtagggggctttgctcctctctaccagttatgtgaccttgggcaagtcacttcagctgcctgaccccagctccctaggactagttgaagtaatggatataaacaccctttggggaccaaaagcccctagagagatgagacctggcccaggcagtaagtcttcaacaaatgtagcataggaggatgctgtaaacaagccagccaaaacccaccaaatcccttggtggaggataagggacatttgagacagtctttatacaggagtctcgggccccaggaagccagggcagagagtctttgccaaacttccccctgcctaacaagaaggaaactgaggcaggaccctgccagacccagaggcaaacaggctgccctcctgtgaacttgttgggggtcatttccacaagggaatagttctagaagaccagggtgagtcagtaacaatggcagaattccagtcagaggaagaagactttggtgtagctggggctggagcatagaggagcgacttggctgccgccctggccctgtgtcagaggtgttagaaccagagccactccatcttgagtaggggctgggtaaaatagggctgagacctgctgggctgcattcccaggaggttaggcatttttagtcacaggatgagatgggagtcggcaggactggtatcataagatacaggtcataaataccctgctgataaacaggatgcgctaaacaagccggccaaaacacaccaaatccaagatggtgatgaaagtgatctctggtcatcctcactgctcattatacactaattataatgcattagcatgctaaaagacactcccaccagcaccatgacaatttacaaatgccatggcaatgtccagaaattaccttatacggtctaaaagcgggaggaactctcagttctggggaaatctcccctttcttggaaaactgattaataatccaccctttgtttagcatataatcaagaaataaccataaaaacagccaaccagcagcgctcaggggtggtctgtctatggagtagccattcttttgtttctttacttctctgtaaacttgctttgacttcactctgtggactcacctcaaattctttcttgtgcgagtccaggaaccctctctttgggtctggattgggacccctttccagtaccattttttctagtgaaccacgaagggacgataccagaaaacaccctcaacccaaaggaaatagactacagccccaattggctgactttgggtaagtgagggatattttattctgggtaatgtatggatttgggttaggttccctcctcagaaatagggggttaaaggcccctcttagtgaagggcaaagatgcttatcagaaattgggttagaggcccaaatgaagaaggttggagtccttagggagttagaggtccccctcggtcatgtcccttggtaaggagaaatggattaggcactatgggatattaaccactattctcttttcattaatctgccttgcactgtttgctgacagctgtgagtgacaggattaggcacgtacaggatcatgggacatggggagctttcttctccccaaagggggaaactttagagatgatgagattgctggaaaagatacctttgctactgacaagcgacctcctgaactattgatccagtgtcaatggaatggaggcctctggcctccctgagctcctcagcttctccaccccccggcaggcaatgcttttcttcctctctcctttctcttttctatcttttctgtcactcagggtgactctccactcttccatcttgcccagctaccatatgttgaaacttctggttggagggcattccacctcacttggagtggatcaaagatgacaagggccatcgggagcaagtttgagccttgccaggttgatgttgggcactgagtggggtggctagtctcctggaatggaaaatgttaatttggtttccccatgcagcctgttggacagcatcttacaaaattaagaggcttttgcctgtggttccatgaaatggaaaaagacgattttcttttgtaacgtgtcttggcccccatagcaatggcacagtaagcagggccatcaaagccacagagagaaagggaacccagaaacctggcatgctggcaaagggtaagaatttcttaccagtcaggcttctggcctctcttggtgcaaactggttgaataaatgataaaaatcactgtttgtctctcctgcaaggaatttgattaatacgaaaaagaattcatgggggctagtcttaagctttagaaaatctggtgtacttagtgctatgaatttttctttctgtgtcagtctgtcataaaaagaggtactataggatacaatgtgggcctaggacccatataagcccattattcaagttggcccagcaaactcgtcagttacaaacttggcggcaggtccctgaaacaaaaacaagaggaggtttctgtcttgtcttttttttacgtccttgcaagtttaaccttgtgaccgtgtgggagtactttctcttagtctccaccatccagacgacaggaagctggggcttcatgtgatagccctaaaaattgtcctgagcagttaaaagcctttgcacgcttgaaattggcttctctgggctccttccaggaaggaaaacagaaactgtctagtgccgtggctcagtagctaaggctttgtctcttcacactggggacccaggttcaattcccaccttagggaatgagtcctttctggtttaatatctatgtgacctttgccatttattcattctcttctccataaacagcttctgacttctcgtttgaattttcctttctctgcactacccttggcgattctagatctcgtaaaaactgcttatcacctctttgaaaataccttgtatacctgggttaagtgctaaccttagttaaggcttaccggtttcacctgggaggttactgttagtgaagttcaaaagccagaaatattggctgtttgtcccggctagagtctggtaacaagatttggttaaaagtcagcttaattaaaaatggatatccaagctatacatatatttaaaaggcctttatgcttttttttctcttcttggctcttatttttctgaaaaattttttcttttcagtcgacttaatttttttccccattttgtcttcttgccactcttgatgccccacctgagaggacctaagataaattttaatagcctgggacttctcaggaaaaaaggaggtgctacagaccctgttttgggagaaacctctgttctcctcatggacacccccaggaattgaaagcagatagaccactctcaaaatctaaggctctgctctgttttgtattgtgttatctgacagttttgacttttggggatatcagaaattactttgcattttaagagagcttttagccttgctatgtaataactaggtggggaatacacttttagggatggctaatggcagttttgtggggatacttggctcttcgcacctttggatcagaaaagcatgctcttggccacctagaaagtatggaagtgtccccaccctccattgaaagataagactgccatgggggatgggctgattccctctctttgggatccaggatccaatataaaaatgaaacccttaattttggggttctgttttgccttccagctgtgcctgcttattaggccttagaaactgcaggctttcctggccctgtttcttgaagggctccaccctgaagtcagtaatccaattaagaaacttaaaaattggcaaatgaaaaatcttacaactactggatcttctgtctgtgtatttatatatgttgtgtgtgtgatgttgatatatgaaagagctctgattaattggcttaaaaataataagtacttaaatcaaatattttgtcagaaaaatagaaacattaatgccttttggttcacatgactttaataatctttgggaaatagagacagttttaaagattatcagtaacattaaaatatcttcaaactttagacatttggtctaaattaggcaggtcagattttaggtttgctaaatgcctcaaggtcataaactgcatcattgacttttgaaaattgcccagcttacctgctttggggccattagattctagataaggcctggggacttgtcgagttagccatgcccccagctatgctggaaagagtcagaccttatctgcacttctgcagataaggctgtcctaggctccacacctggaatataagtaaaactgcttacttaccaggtttttcaccaaaaaataaaagttgctaagagttaacatcgtaatatgttatatgtaattgagactactagagaaacagttttatatgcaaggtgtgtaaggaaaattgaatatgcttttggtaagaagattataagaaagcatgggaatgtggactttccccctactttagagggttaaaggattgtttcaagttaggtaggataaagctgaaggtttgagcaagttatggaaggtttgtgaaagattaatcttgtaaaagaaattctgtgtgaacttattggcttaaattaaagggatattattcagtttttccataaattaaatatggaataaaagtataacaaggttttcttagagcactggtatactctttaacaagaaaattgtaaagagctataaaaggtttatgagactcttacctcatggtcaaacattaaaattggatagagttgtctataaggctttattatgaattgggtttgacattaatagtacacaaatgcaaaggtaaaatttggctttctctcttgaacaagtttttcatgtaatattgaaaaataattaaagatttttgtttgccttttgaataagctatagaaaaaagaaaggaacgaaaagagacagttttttttggaaagctaagtcttccctttatcggtgagtaaaggtttttgcccttaaaaacatctttgagttatcattttggccaaataaatgacttatggtgacctgggatgctattttgtagtatcaaatgttttaaatttttgatatttgacaaactttccaaaatcaaattctaagttatgcctttttctaacctgattagtcctttagatattaggtcccctaaagtccaaaaatgacatatttggcttatttggtacattaaaataatacaggaagcattgtcaaatatgaaattgtgtttggctttctttgggctgtgtttatataaatatgttattggtatgtgttccaaaattatgggaaactcctataattctgatatgaacattatcaatactaatggacattatcaataataattataattgttatgatgttaatttattatatgccacagaggtatccacatttcctagtcaatgatattaattctttaaccatgactgctctaagtctttctgtcatccatagacaattgttgtcttgcttttattctcttcaaaaggtggtttataatcagctataggactctgatgagtactcttaaatgcagagaaaaagaaaacagcatccaagactcttggaaaactaacacatatatatcaagcaaaacaggaattaattgcatagactgaactaataaaagactgaaataatcttttatgactttttgcttaaaatgttgttgatctttctgttttgtttttcagagtcaagtaacccccccttcttgagctatttacagcttttaacaattgagtaaagtacgctccggtaaggattataaaacaaagttttgtccaaaaacaaaatttggaatatgtttttttctctttacctgatttctgcagaatttggaaactatttgtgagtgttcttaacttacggcaatatagttatttgcataagtgcagtaagaatctgtttttccttctttcttctttttttttttttgtaacaggacacaattggagaaactggttatttaacaagggtttgactggaggggcatgctttcaaatataaacagacttctttaaggaattaaagttgactaatagagccaataaaagcctcttggaaaaactggtcttgtaccttgtgtatgaagtccctgtatagggttcctgacctgtggtaagtaaagaatgtaactttctgacaggcctgggagccccgagttatctcgggacctcaagaggagaggaatttatctaactcatacaggttcttgcaggcataggtaaatccatggctgggctcaaagctttaaaacatctaatctaagataccttatgaaacaaagccaattttaaaaggagcctgtatggcaaataattatacttgctgcactttatgcaaataatgaagccaagtataataagactaaagcttattttgcaaataaattggtcctaccatgatttgtttttaataaaaaatgggagactggagagagaaaaacggtgtttcaaaaaatatggtacacctgtcatagattctagtctcatccattgtttttgagttttttgtctgcaatttagactgaccttgcttctttctgtgaaccaaacagtcatctcttgactgcttctcgtcagaaacaagagggatggataacataaaaatctggatcagtatctaattctgagcatgtattggaatcgtctagcaactccgtatcagctcatctagcaattcctgtgactaagaatgcctaacctcctgggaatgcagcccagtaggtctcagcctcattttacccgataagtcacaggcattcttgcccagttcatggaaagccttcttatttggattacttgggataattttacttattttactttgctgttgtagaatatattgctgctatactctttgtgtaagaatgcaagataagcttactcagtgcttccttaaattgaacacattaatcttccagatatcaccttttgttaggactcagagttacaaatgactctgaacacaccaacattttcttactcagttcctctctgcaccaaacccaagagactctaatagttaggcaggaatatcatcgcctctattcagcctgaagaagttacagaagatggatcttcatgcctctacaacccttaagattaaacgttccctcgtaaaagagagtagggaaatatgtcagaggtgttcaaaatagggcaactccatcttgaataggggctgggtaaaatgaggctaagacctgccaggctgcattcccaggaggtcaggcatttgtagtcacaggaagggataggaagttggcaggactggtatcacaagatacaggtcatcaagaccctgctgagaaacagtatgcggtaaacaaaccagccaaaacctgccaaatctaagattgcaatgaaagtgacatctggtcatccttattgctcattgtatgttaattaaaatgtgttagcttgctaaaacacacttctaccagcaccaagacagcctacaaataccatggcaatgtccggaaattaccctatattgtctaaaagggggaggaagcctcagtttcaggaaattcccacccctttcctggaaaactcatgaataatccacccctgtttagcataggatcaagaaataactataaaaatagccaactagcagtgcttgggggtgctctgcctatggagtagccattcttttgtttctttgcttctctaataaacttgctttcactttgctctgtggacttaccccaaattctttctggtgcaagatccaagaattctctcttggggtctgatcagtacccctctctggtaacacttgcatgatacctgaggaggtcagcctggtcattcacccaacaaacatgggttaagccctcccatgtgcctggcacaaagggggctgaggactgcagttctggaacacctaggctctgagaggcgacgcgactgtggtagcagggccaggattctagcctgtgcctggagggccaacacctgcaccttctctgctacccaccctgcctctgtgactcagagcagttaagcactttagctcagggtggactcagggctgcctcccccttcctgagcaacctaggggctcctgtgccccatgcctgtgtccatttcccaatcatcagggggcctcagactcctgcctgctctgactttctaggcctttgaatcaagcaagaccccactggatcaccaaagagttaagcaaaggaaatccctgcctccctttatctccgcagaacccagaggctgaaagggagggagcagggaggaggggaagtgggaagcggctctgccctctccctccgccctccctccgccctctctccctccatcccctcctctctccctcctctgctgggcctgggggtctgggccagcaacaagttagtattgcagacatgggccaaggagccagaggccatgcagtggctcagggtccgtgagtcgcctggggaggccacaggacacagggtgagtgaccagaggctcctcaagcttgggggctggggtcagagcctggaattcctctcctccctccttgcttcctggaagcatctcgggccctgctctctccctctgactgggacagcctctccaggctctcccctccacatttcctcctgcctctggctgagggctgcgctccactgctcccggtttgtgcccgcccctacccgggcacacacaaactcagctctgcacggcctgcctggaccgagaaaagttgccctgccgctccctccccaaagaggtcccagtggaagcagcaaggaccccaaaagtcctccctatgacttggttcccacacttggtccctgcctggcacccacccccagagctagttcgtgatcctggctgtggttatgattcctcgttaacggcttcctgattcctgctcccaggccacggttctgtgtctcacagcctttgactcccatccgctggggccaataggaaacagaaatgctcccaaaccatgccagtcctctgggagaagttctccttcccatcccatgcaggcacagggaagaagtcaaagcacactttttttttttttttaagtcttttataaggcaggcacttttcctgcattgaaatccttccaaattacctgggagggaaagggtggtgtcatttccttgtaagtatcaaggagcaggaagcccagagaggttcagccactagccctaggtcacacagcttgcaaactattctgggtctcagatttgactctaagacctcagcttttctcatgaggtcatatctgtggctgggaaaaagaagggaattttgggatttccaaaaccactgggatttgtcatttataagtaaaagttgaggatgacagtctcagacagggaggatgttgatctctgaggatttgacctccttattgagcagaaccaggaacccaaccagggtgggcagagagaagcttgggaagagtcacctccaggaagagggaggtggctctggagacttcctgtccagcccccttctcctgctgctaccatccagctctgggggtggggggcagggctcctgccgctttatttatttttagttttaatttttgaaaaatagagacagggtctcactatgttgcccagactggtctcgaactccgggactcgagtgatcctctctccgtggcctcccaaagtgctgggattgcaggagtaagtcactgcacctggccatcctgcccctttaaaactctgccctcacctcagtgctcagctgagacagggtggcattttaaaaagtaataattgtaccttgtctacatgtattaaccacaaaaaaaatatttttgaattctactaaatgttaaaggagaacaaaaaggaaataaacaaagaaacgccagaagtgtaaaaaccagtctggtttcaaaagcagagtttctgatcctgtgataactcggcaccagcccccagaagctgcaccacctcaaaggtctttttgcccggcttcctgcccacccaacccaggactgtctctagcgcctggtgtccaggctacttcctgcctctctcctggagccctagaccccttcttggccaaggccagagacagatcctcaccaacacttacacttttctgatcctttagaattttttatacctcctagtcctaccccttaattccaatttaccaccttggcatctgattggcaggtctacgatgattgacacaaccatcttccaatgaactaactctctctacagaaccctccctgcagggcttctggataaggttgggttgcatagatagttgactgcacaaaggtgctgagcagggaggtggactagcgccagcccttgccaagctgcacaccctcagcatcacgtccctccaacggggactcttatcatttctaatttgtccagaggggcaccttctttgctttgcacaaaggcactctaaagactagcaatgggctgcagtcaaggacccagtattccttctcctgactgctcagcgatgcaatgacaccatcaccgcgcaccaccccacatgctctcatggacgttgctttctgtctgctaggatcaatgaactctcttatctcttttttttcagaactatggtgttctcacaccaaagcatgggctcggccacccatcccctctcctgagaacaagcctccagaaccctccacgtttgtccccagtgttcactaacctcagtcctcctgcccggagggcatgtgtttgctggagatagtggagtcggtggcaagaaagtgccagagggaggtgcgcgggcgggaaagcatctgacggtctcctgggttgccacccatggccagctggggcatcttctcacctgccccagcaaagcttcctgggatccctgtctgctctcagctgtggctgttttcagaggggcttcatccttccaaggcctgtgtggagcagaagcctccatggactgggtgcccggagactcagcatgcaggccctgccctgccagtctcctcccgatcttggggaacttgctgctctgtggaggtctcagtcttcttgtctgatagatggggacaataaccttccctctggagttaggtcaggagtgctgtggctggaggacgcagcacccgcccaccccaggcatcggcacatagtagatgttgagtgaagtatagttcctgtccctccttccttgttccaggtcaccatggggacagccgccctgggtcccgtctgggcagcgctcctgctctttctcctgatgtgtgagatccctatggtggagctcacctttgacagagctgtggccagcggctgccaacggtgctgtgactctgaggaccccctggatcctgcccatgtatcctcagcctcttcctccggccgcccccacgccctgcctgagatcagaccctacattaatatcaccatcctgaagggtgagtgccctcctgtggggcctggtagtgggcagggagggccagggagctgaggtggagggagtagagggcagggcggaaacctgtccagactcctctttcatcctgagttattgagccccaatgtgagcctggtctgttccaaacactgatgacggagcgtgaacaaaccagaccaagatgcctcctgcctgagcacccgttctcggtggggagatgggctgtgagcaaggcacacatcacctaagttagtggagtggaatgttcgatggtgatcagtgctctgggaaatgaaaaggggcttcaggagtgcgggtctgggctgcaggctgcatattgaatgaggtggtcagtggaggacccatggagcacaggcttctaagaggtggtggaggagcctcctggcaaagggcacagctggtgcaggggccctggggcagggccgggagatgcaccaggctcagatcacatggggtgctgtcaccacccggctactgtagggacttgggctccgctgagtggagtgggaacaggggcaggtttgggtgggacagggacttgatcccacccaggtttcaaatggatccctctaatgtcatgtggagagcaaccagcgggggccgagggtcggagcatgcagccctgtggggcctgtccaggtgagggccatccaggtgagggctgtccaggtgagggctgtccaggtgagggcccgtccaggtgaaaggcatccaggtgagggccgtccaggtgcgggctggctacccgctctctcaataggacgtggaaggactcgcttcccttccaggctgtggtggctgacggctgtgaccaggccttgacatccttagcgtccgtctctgcccacaacagcccgtgaggtcgatattttcttattcctcccactttgcagatggggaaacccagtctcctggggccacacagctgtcagggatggagccaggatttgttcctgagctctccccggggacactcactgcacagccagtggtcacctggcacctggcctgcccttgttctgatttcgtggtgaggacgttgctcttcctcacacccccctccccacccagcttccccagggctgacttagctctctgcgtgaggttggagaggtgcctggctgctgatggtccctcctcattgccctccccaaacccagggtcactgctcctgggcccagctcagcagcctgctgggaggtgggtaggctgccgtgagggacctcgggctggctttgggagtcctgggtcccagcctcacctcttctgcccccttgcccagtgagtcaggctggtctctcccccgccctgagcttgctgccttatttgtaaaaagaagatagtcccttcgtcctgtccaccctccactccttcctttccttgggctggggcacaacaaacttcctgcacaaggtctagagctgtgcaggtgaggacgtggttctccagccaggcggtggagccagaaccctgcagagctgtggccttgccctgcccagctctctgggcttccacctcaagggcctgtgccctcctttctgtccccttccccccctgtggaaaacacagggccttctagcccatgcaaggatgtggttgctcgtgtgactccaggcactgtgacaggtggcagggagctatgtgaggtcgggtccctccaggcgtgggtggtcacctgcttttcttatgttgaaagtcagcctggactaagggccgggcagggctgtgcctgcctgggggccattgtagatgctgccagacctcagagcaggtcgggatgggccagccgtgctgggtgaactgttctgcctcttagttgcagagtttgcaaagtgctttcccacaggacattttgttgagggctcacaaacacccctgaggtggacataatcctctttaaaatatagaccagaaaaccgagaccccagccgtggagtgcccgaggtcacacagggcaggactgccaaccaagggcttcctggctcctaacctgggcttttcctccaggtgggcaaatgtatttttcttggtttcttccctgggtcagaaacccaaagtatgttccagcacaccccacatccctgccagcctggactgcgctgtggtcctggggtgggggcctgggcctggcctcccagagacaccagtcggaccctccctgctgggtgaggggaagtcaagtcaccctggggacagaccatattttaagtcctgcctcttctgctcctgcactgtgtggcccggggtgagtcactcaccctctctgtgaagtgaagacggtcatgatgttttctttaggcaggcatgtggggaggcaatgtctggcatacagtaggtgctaaataaatgctggcttcttctctgggccaggacaggggcagagccgtcacagatgagtgtgggcacctccttggagcaggctcagatgtccaccctgacttgtcccctttttatccccacaggtgacaaaggggacccaggcccaatgggcctgccagggtacatgggcagggagggtccccaaggggagcctggccctcagggcagcaagggtgacaagggggagatgggcagccccggcgccccgtgccagaagcgcttcttcgccttctcagtgggccgcaagacggccctgcacagcggcgaggacttccagacgctgctcttcgaaagggtctttgtgaaccttgatgggtgctttgacatggcgaccggccagtttgctgctcccctgcgtggcatctacttcttcagcctcaatgtgcacagctggaattacaaggagacgtacgtgcacattatgcataaccagaaagaggctgtcatcctgtacgcgcagcccagcgagcgcagcatcatgcagagccagagtgtgatgctggacctggcctacggggaccgcgtctgggtgcggctcttcaagcgccagcgcgagaacgccatctacagcaacgacttcgacacctacatcaccttcagcggccacctcatcaaggccgaggacgactgagggcctctgggccaccctcccggctggagagctcaggtgctggtcccgtcccctgcagggctcagtttgcactgctgtgaagcaggaaggccagggaggtccccggggacctggcattctggggagaccctgcttctatcttggctgccatcatccctcccagcctatttctgctcctctcttctctcttggacctattttaagaagcttgctaacctaaatattctagaactttcccagcctcgtagcccagcacttctcaaacttggaaatgcatgcgaatcacccggggttcgtgttaaatgcagattctgactcagcaggtctgagtgggtccaggattctgtgtttctcacatgttcctgggtgatgctgatggggtcagtctatgaaccacactggagcaaccaggttctaggactttctcaatattctagtactttctgaacattctggaatcctccccacattctagaattctcccaacatttttttttcttgagacagagtcttgctctgttgcccaggctagagtgcagtggtgcaatctcagttcactgcaacctctgcctcccgggttcaagcgattcttctgcctcagcctccctagtggctgggattacaggcgcctgctaccatgcctggctaatttttgtatttttagtagagatggggtttcaccatattggccaggctggtcttgaactcctgacttcaggtgacccacccgcctcggcctctcaaaatgctgggattacaggtgtgagccaccgtgcctggccaattccaacattcttaaattctctcatccctccagggctccccgtgctatgttctctttaccccttccccctcttctcttgctcaggcctgcaccactgcagccaccgttcatttattcattcattaaacactgagcactcactctgtgctgggtcccgggaagggtgagggggtcagacacaggccctgcccctgccctcagtgactggccagtccagcccaggcggggagagatgtgtacataggttttaaagcagacccagagctcatgggggcctgtgttctgggtgttcaggtgctgctggtcctccattacccactgctccccaaggctggtgggacggggtcccggtggcaggggcaggtatctccttcccgttcctcatccacctgcccagtgctcatcgttacagcaaaccccagggggccttggccaggtcaagggttctgtgaggagaggacccaggagtgtgggggcatttggggggtgaagtggcccccgaagaatggaacccacacccatagctctccccacagctgatacggcatcctgcgagaagacctgccctcctcactgggatccccttcctgcctcctcccagggctctgccagggccttgctcagtcccttccaccaaagtcatctgaacttccgtttccccagggcctccagctgccctcagacactgatgtctgtccccaggtgctctctgcccctcatgcccctctcaccggcccagtgccccgactctccaggctttatcaaggtgctaaggcccgggtgggcagctcctcgtctcagagccctcctccggcctggtgctgcctttacaaacacctgcaggagaagggccacggaagccccaggctttagagccctcagcaggtctggggagctagagcaaaggagggacctcaggccttccgtttcttcttccagggtggggtggcctggtgtccccctagccttccaaacccaggtggcctgcccttctccccagagggaggcggcctccgcccattggtgctcatgcagactctggggctgaggtgccccggggggtgatctctggtgctcacagccgagggagccgtggctccatggccagatgacggaaacagggtctgaccaagtgccaggaagacctgtgctataaaccaccctgcctgatcctgcccctgcctgaccccgccacgccctgccgtccagcatgattaaagaatgctgtctcctcttggcgattcagactggttctttctgctcggctccctctgcccactctgcgtgctccctgcccacaaagaagcgagcccccaggtcactcacgcagctggcgcgccttggagctagtggcaccagcatagagtcagccgtgtcactctttggttgtgacctcgggcaagtccccatatctctgcgcctcggtttcctgtctgtaaaatggggacaatggtaatctacctcatgcggtggacataaggatcagatgccaggttgcttgatgagtgccgcgttcatgctcagcatctgctgagcgccaactgtgtggcgcagagctgagcacctgtgccgtttatgctccagtgaggcacacgcaagcccccccacctcccgccccggggaccctgtcgcatgttttgcgtttaattatgatgagagaactgttggatcttctctgtgggaaaacacacactactacattgtacagtggagcatcttgatggatctggctttcttttttttttgagatggagtctctctgtcacccaggttggagtacagtggcgcaatcttggctctctgcaaccgctacctcccaggttcaagtgattctcttgcctcagcctcccgagtagctgggattacaggcgcccaccaccacgcccagctaatttttgtatttttagtagagatgggggtttcaccatgttggccaggctggtcttgaactcctgaccttgtgatctgcccgcctcggcctcacaaagtgccgggattacaggcgtgagccaccgtgcccggcctggctttctaatatgtcgtcaagtttggactctctaggctagcctggtggctactcacataagtatatttaaagtgaccgacgctgatttcccaacagacttgaccgggcatcctgctctatctgtgttgtccctggtgtgttgcatggcttttgggcaccaggtggaagaagcatgctatcgagaactgaccatacacctgtgccaggattcagcccagcccagcagcccaccttgcaggggcagacaggtctccgtttcctcggaggtcccctgacactgaagggaggcttcccactgcacctcagggtcatacagctcttgccaaagaggctcctcccatgtcagaggctaccccggggagcgatctccagcgtgtttctgggccaggctctatttgtacacaatcggcctcaccagccttgggacaaaggctgtcctgagtgccagccaggagccttttgtcgtgtacagcacaaggatgagccatttgctgatcgctgaggcagcaaagctttgaaacttcttgccaagtgcctgcaggaggattgaagcttatcctttgtaaactgaagccaagtcccccagacagttccaggccacattagttcagggaacagaggccggctgtctttgtgtcatcccatctgacccactgcacacattcctccacccagggctcagatgtggcctctggactgtctaggccaggtttttttgcgctaggtctgggtttctgactcaatggcacccggatgggtgctaagagccactagatctttgtgacaagcttctcccaatgggcacgttcttggcgggggttggtcaaaggtcctgggaaactggaggcccccaatcctgctgccaggtctgtggggcacagcgtcccccaggagatctgccatgcttagtactgatgacctcagcaagctggctgaatgcccatgtaatcacctctggggcaatccctttaagttacatattttgaaaacgttttccgcctgaaacgttaggcaatgaggaaggggaaggaaagggtggtcaagaggggaagcagccgtgggaaatgaaaaatacccctgacaaggagtgtaccccagacagggcgacctcacccccaccttgccatcgttttgttgagtggcccggggcaagtacagggaagattaagggggaaagggtgattagatgggagcctgagttaaaatcaggggcagagctggtgcagggattttagcttgatggtgtccctggtgacctgctgtctggatagatgggctggatccatttcatgggctaggttaggttgtgtctggaagtgttcagccttcctggggagatgagcgcaggagctcctctgccacatgggagtgtggggaagggagtagataattcttatgtggcgatctgggaaggcttcttagtggaggggacatgtgggaagggccttggagggtgaataggagtctcaaaggcacttgacatggggcaaggagctgatgagaggaaagggttgcaggcggaccaatgtagtctatgctctgggcagtgggagagaccagtaggttggatagatgtctggaaaggaggcaaggagagcagaatggggtttgagacaggaaaggcctggaatgtcaggctaagtctaggattgacctctttcttaggtgctggggtgcctttaagaggcagatcactctgcagccaggtggagcacaggctgcagagggtgaagctggaggcagtgagggggcctgtgccatggtccaggggaggacatagaacgcctagaaactgggtgaatcatgatgtcatcctggagggggaggcatgtccccaattgactttgaagttggtgagagattcaacagcagagaggaggcaggagggcagctgggggttgttggggggacggggtccagcttggattaagggtctaccagggtgtttctcccacaaggctttcgttagccagtgggaagccagcaggccggggtgccaggaggtgggctcctgtggcagctctgcccaggagagtcccttgtttggctggaggactggagggtgctgggtaaatcgtttagcctttttgggccccatattgtccttatctgtaatatcagatgcaaaagcccttctctcttaccccactgaggacttcagggtatccaaggctgcaggggcatggctattttcagaaccccaaaccaggacccatggagaagtggcagtgggacagaaaacgtgaaattagcagcagttgtcccagagaatactaagtgtacgggacagggctggggaagcctgagagaggtggtgagtgctcagacgccggcatgtatggaatctggagccaggctgcgggttctgaccccagcacaccctttccttagaccagctcctggttcagggcgcacaacattatttttcctatagtatgaccggggcttgtcacttcctctctgtgagtcttggctttgttccgatagaggactccacgtgacgatgtatctcggtattagcagtgtctggcacacagccgtgctcaaatggcatgggttcgatgagtgacctctctgagcatcgtgggaaaggtgcggggcgaagtgagaagcaacagtctctggccagggaggaggccctgcagcccccctctcctctccccgcctcctcctccacttggcaggcccgtcacagtagccacatactgccacgtgtgcgtctggaggaaaggagaaacacaggcagaaacttaacatgaccagaaacagatgtcaagaacattatgggtgaggccagcgggtggccgcaggagccagagaggaaggagggatttccaggacacgagtcaagggtgcgtggggctaagctggcgtggctttggagcagctggccttcagacccaggaggacaggaggcggtggtgaccagcacctgggggctggggtcgtagcatacagtcaggtgggctgtggagttgcagcctggaggtggtggcattggcggcagaagtagggttgcttcacgggaggaaggagtcattggagagggctggctgtaggcgcgtggaggaaagaggtgaccctctgcaggtcagcagtagagtgggagggtggggcggttcctgcaggtggctggctgctcttcgcttctggtgggaaggaatggatgccacaaatgcagatgtatacaaaacaggccgtgctttagttctctgagtaaatttcactcccattaggcatttccatgggctgaagtcaaagaaatgtgattttggcagctgggattcctccccgccccccgatatttccctgcggctgcatctaagtgcccctccctgccagcagggaggagctggggcactccatgtccacgtttcctctgcgagtttggcaatgtcccatctgctctgggctccgggtcccactcccatacctcctgattcatgctcactcccacagcgcctcccgggtcctcatccctcttgggacacctgggtgcttcctgtacacaagttccttgcctctctgagggctgtctcacccagccctatctgcccggatacaccctggggccatttcttccctggggtctcagctgcctttctagggttttgcccaggaagagaagaatggctcctctgaagctcggatgtcccaaacctgttgggggtctgcctgggaaggaggagacaggatcactttggccaggaatcccaatcctaactcatctcttgtttcccctctgcacctccccaccccgtcacccagggatgacgctccttgagctcatctgagctcctctgagtgtcgggagagggctcaaggcaacctctcccaaagcttctggtggggctctccttgttctgaaacctaagaacgtgcagaagtctccctttccccctctgctttttgcctcgtagcctctgtatttgttaagatgcttttgggtgcaaggtacacatattcaacccaaagcagcaagagagaaaagtaaccctaagtcccaggcagggcggctcagggtccgtcaattcagcagctgagcagctcagcagctcgctaaggacctgggtctgccccatatctccattctcagcacaacagatttgcccttaggccaatgatgtatgatctggctctgtgtccccacccaaatctcatcttgaattgtaatccaaattgcaatccccacatgttggggaaggcacctggtgagaggcgattagatcatgaaggcggtcaccctcatgcttttctcgtgatagtgagtgagttctcacgagttttgatggttgtataagggacccttcccccttcactctgcacttcgctctcctgccagcatgtgaaggtgccttgcttccccttcgccttccaccacgattgtaagtttcctgaggcctccccagccatgtggaaccgtgagtcaattaaacctctttcctttctaaattatccagcctcaggcagttcttcatagcagtgtgagaacgaactaatacagccagcttccctcagggccacaggatggcagtctcaagatggtggccatgagatttctgttctgggtccaggtgtcatatctgggtatcacccgccaggtcccaatctgttctgccagtgtgcagccaatcgctgtgacttgggatttgcaaaagagaaaagattgattcacaagcctgccaagcaaggaggtgggagaacagcgttcaaatctgcctccccaaagacaaggtttagggatatgaatgggttagagaagtggggtgatctaaggtgtggggacaggtgattggcagtggggaagaatgacgtaaccggtttgttctgtacaagcatagttggggttcatggcatttcataggacacatacagaaaacagatgcattggcctgatctgagcgtggtgcttttggtcctccaatatcaaatggccatctcttgggcacatatacggttccccagctgaagggtctcaactggtttcagctggcccaattcctgaaaaacaaccgaagccaccattaccatggtgacctatgaatgttatctctaaagtagccagtgaaggttgtttcagcattcagtggcaaggctttcagctcccttggccttcagcttcatggaaaaaagtctcaaaacccagcgacgaacccttccgtttcatggatgtggcaagggtgggtgaaagagaatcagagattcttctgtccaaaagcctcttctcgcttctcattggccacagctggtcacataaccatacctaacccaacctcggggaagtgagatttacccctgaaccctgaggggctgggctggagccccaggcaagatgagagtcccactcacaggttggggtggggtggggagaagctgttgagagtccagttggttcacatttcgtaaaagctctctggccatattgtcagatgcgggtgcctgactcagccagggtgtcttggttccaggaaatcttcccagatgtgagaggcagctggatccctgagcgtcccctggttatagtgtttagcaatagttggctctgctcacgaggcttcaagctcttggggcagcagggctacagcagcgccaaagctaccacctccaggacccctccccaacaccccctggcagtttagtgtgtggttaatgctgaggctgctggaggcactgcctgggttcaaatctgagtaaatgaggggaggtcactgaaactctctgtgcctcagttttgtcacctgtaaaatggggatgatagtaacactatctgggctgttgtgaggattaaaggagtaagtatatgtaaaatactggtacgtaggaggtgctctataaatgttaaaaattattttaaggtagacactttcttatatttattttacagaagaagaaactgtgaagtacagaaaaactgattaatttccttccttcatgtgtcatttgtttacccaatcaataattatggattgattcctattctataggcttggccctgtgctaagcacaggggacagtgtggtgagccaaaaccccacatggtccctgccctcatgcggcttccagtctaataggggagagagacattacacagtcacagcagggcttcagcgtggggtaagtgctggcaagggagaagcaaatttgggagggagaagtggtcagggaaggcctctctgaggaagaggtggttcagctgagacccaaagatgagagacatagcacagctggtggaggggccaatatgggtcaaggccaggaggtaggaggctgctcagcccctcccaggaactgaaagaaagacccagaggccggaaggagccaggttttgcaggacctgggatattcgatcttgtccagtgggccacaccagaaggaagggatggttcctgggaaagaggggaggctcatccaggacctgagctatgacttctcagaggatggctggaggatgggaaacactctctagctctttcggtggttctcaagacagggcagggctccttacaggagtctatgaggaggcttgtgccctcagccccacagccaatggtggctggagccagcttgcaccagagccgactgcatgcatgtcttcccgatcgcaggttcagagacatcacgatgctagcttgaaatgggtcatggtggcaggatatatactgctagaaattggcagatgttgcagtttgccaatttctagttaaagcatttaaaaattcttacaaaacaaagccttcattagaaatgcggcttgggtgggggctgggcccagtgaaggaggcactttgggtgtggccccaggctcacaagttcccctcttctccagggacccctcgccactgcccacccccaaaacctcagccccttaccccacccttgggctcatctctctacctcattctgggccctattggatggttgacggctccaagggaggccccaaccctagcagggccagcttgagtcctgctctgcagatttgggaagcaggaccgcagccaggagctgatggagccgagtgcattaggaggtgcagccagggatcccaagcacagcgggcgccaaggggctggggctaccctggcttttccttcctgcaggtttggttggggctctagccccttgcctccatccccaacatcactttttttttttttttttttactttacctttagttaatagttgagttttcttgctcacaaccagagagcctcaactgaggtgccaaaggtcccagaaatgcaaaccacctacttgagagggagcattaaagcagtaacaggtcatttcaatcctgacaacgtcagccgagcatctatctgtcccaggagctctggggatccataaatagctcagacaggtcagatccccttgcgggttctcaacccaggggaaagctctgacccgcagtaaaatgagggaaacacagtgtattggggctataaaagaggtttatataaggtgcaagagtagcgagctcaaaggaggagcaaccaactctgcccatatgtgtttgggtcttgaaggctgtgtaggagttttctaggaggaaaggtgaagaagaggattgtgagcagcattctattctgtacaattgcatctataaatcccataaatactttctgagaacaagtcaagcagtctcttctcacgtggagcttgcagtctagcgtaggcaaaggcatgcattgggaatcatgtggcacatttcagggagttataaattgcctcgcatattcaggaagcattccatagttttcatccttcctccagttctgcctggctccctccttccttcagattttcccatcgccttctggtgaggtccatctaccctgactgccttgtttaaaattgtgctcctgattctctgtctcccattttttcttttctgatagcgtttttcatcttttaacctcctatgaaacttacttagtccttatgtttattgtctgtttctcaccccactccccactagactgtaagcgtcacaagggcaggcgtctttgttttgttcactgttgtgtcctaagcctctagaaaaagggtttggcacataggggctcctcaataaatattatttgaatgaaagagcgtgaggccaagcatgacgactcacaactgtaatcccagcactttgagaggccgaggtgggtggatcacctgcggtcaggagtttgagaccagcctggccagcatggtgaaaccctgtctttactaaaaacacaaaaattagccaggcatggtggccgcgcctgtagtcccagctacttgggaggctgagacaggagaattgcttgaacccgggaggcagaggttgcagggagctgagattgtgccactgcactccagcctgggcaacagagcgagcctctgtccccctccccaccccaaaaaaagagcgtgagtcctagaatttgggaggtagtaaaatccaccctcatccataatatcggaagttccacaggctggcaggatcatcccaccacgtgcccagcttccaaccacagaaaggcgctcccagaattttgcaggatttctttggatttgcttcatgtttatctttgagattgcttcatctctttggagatcagcagtaaagtcttaaaggcagcaggaatctgtgtgtttgcggagacaatgaggaaaggaactgagggaagtgtgtgtggcccgtgcagtgaggctgggaggccatgagccacgtcaagcagtgactgcgtggtggagaaccccaaatgtggcacccttgggactgagaggtggccagaaggggcaagtcgactcccatgatgcctccacagagagggatggaggcttgggttctagactgtccacccccaagaggccacgcctgtcattaccccagcccctgggtggcgctgcttcccctgtggcagacacgcatctctccacggctgggggcagcggggacagtgcagagtctgccccccgctgctggcctagcttgtccatccctgtctatgaggagctgttgctcttctcagctgctctcctgttaggtcttgggacctgcaccttctgtgatgtcagctgctaaaacacaccccatctcttctgcaaaacaggtagctcatttcacccccaaccttggcaaacaccaaacttcctgcagctgctttggttttcttcagggcctttctgccgtgttctggccttcctgaaagagtcttattattctgtccatccacatccactgtctgtccatccgtctgtctgttcatcccttcatccatccatccatccatccatccatccatccatccatccatccttccttccttccttccttctcccccatcattccttctctccctccatcattccctccatgatccccccattcatccttcttctgttcatccatcagtccattttccattcacccattaaccacccttctatccacatcacaatgactaagcacctcctatgctccaggcacataccaggcagcataaagaaatgcagaatgaatgggattcagttcctgcccttggggagcacccactttagttggggagagaaggaaggcctctggcaggtacctaaccccatcagaaagcaagggtaaaggcctgggaggcttcacggaggatgtgaacccggggcctgaaggatgatgagtccgcgggataagaaggcaaaggaaggatgccacatgcagggcagggagggggcaaaccctgggaggagggggaggcatgcaagcgattctgcgttctgtgtggccagaggattggatgcaaagggggatcttcaagagggggcccagttagggacagccttgaagccagactcaggatgcttggatagggtcttgagggcagtggggagcccctgaagagttgtgtgcaaggatgctctggatgcagagtgaaggatgacatggcagcatcccgctaacaaatatgaacccctctgtaaacagaacccctgtgtaagcaagaaccctctgtaaacagaatccctctgtaaacagaacccctgtgtaagcaagaacccctctgtaaacaagaacccctctgtaaacgtgtaaacaagaacccctctgtaaacagaatccatctgtaagcaagaacccctctgtaaacagaacccctctgtaagcaagaacccctctgaaaacaggaacccctctgtaaacagaacccctctgtaagtaagaacccctctctgtaagcaagaacccctctgtaaacagaatccatctgtaagcaagaacccctctgaaaacaagaatccttctgtaaacagaacccctctgtaagcaagaacccctctgaaaacaagaacccttctgtaaacagaactcctctgtaaacaagaacccctctgtaaacagcatccctctgtaaacaaggacccctctgtaagcgagaacccctctgtaagcaataacccctctgtaaacagcatccctctgtaaacagaacccctctgtaagcaagaacccctctgtaagcagaacccctatataagcagtgcccctctggcactgggcgtggagggaaggagatggagctggggaaatattaggctctggtgataattgttgttccccaactgccttcagccacctagtctgtgccttggctcttgcagctccctctgtcttgggccctttctctcgacccattccggcctatggaacactcatccccatcctcccagagaagaggaagaacccagccttcctcaggtgcctcctgcatgccaggaactgtgggtgatggcttctctgtgtgcacaatctcatgccatccccatgaacctaagaggtggggagtagtcgcatgtttcagatgcagaaacaggctcagagaggtaaaggaacttatccaagatcacacagctaggaagtggccaaggtgggatggggacccagccctcactgcctttgcacaatgacccactgcccacagcaccgatgccacatcctctggagcctcccctatggctccagccaagccacgttctatttttgggtttgtgtttttgtgttttgtcatttgcaggcgtttcaaactgggcacgctctatgcctctcatactcattatgaccacattttctaaagacaaaactgcacagacagcctgaaaaagtattttttctgtcttgttactttctttaataacgtcttagccagtttagaatcaaatcacatgtatttactcttctcacgtgataccaggactgttctgaaagttcaggccaagggtcaccacattgacacgatttccttagttataatcatttgcatacttgtcctacctccataccaagagaaggtactctgagttagagttcaaatcccacacatccttgtcattcccacagtgcccagcatgctgctgccagcaggtgctcagtaaatccttactgaactcatgcaaaggggacagacaccacctcagcccaacaccaagattgtcctccctccctcccgcaccccttcccttcctcccttgcttcccatctttcaataaatgcagtttgaatgcatttgtcacacaaagctttaggctcagagaagctgtgggactccatgcacttcacctgtggccttgaggcaccgcagtccagccaggaagacagacaccaggcaaatcctcccacctatgcccagtcaattaggaatatgagcacctgatccagtgatgggcagggcagcatccactttagatgcacggggtgctgggaaagctgccctgagaaagtgaccgcaggctgaggcctggggcagagagaacgtgggcaggggctcgaggcagggaagagcttggagacttccaggaactgccagacagccaggggcagtggggcaagggagagaagaagccagagaggccgcaggcctgggctttccatggcgaggaggcctggatactgcataagtgcagcaggaaatgttgggtggggtcggattttcactttacaagggcagtcgctggggcagagggcatgggactcagggagggactcaggaggcagagagacggtgggacgagactgagggtgccggctggggctgggggtagaggactgtgagcgcttggcacttggaggcagtcagagctggtctgggcaggggtgctgtcacccagggccgaggaaagggatacaggaggggcagagggtgggtcggaggctgtcctgggaaccctaaacgtgggggccaggagaaggaggtgctcccgtttctgatctgtaccaattaaggggaaggtgagaaattgcttgggtggagtgtccttctctgagtctgggggttaggtgggatgaggggacctcggaggctggaggccagagttcacactcctgccctgctgtgtgacctaaggctgagagctgcctctctctgggcccagatgcatcattacctattcagcaagcagctgggcctgagagcctccgagatcccttgcaggtctgctggtctcggctgcctttccttggtctgccctcatgctgtcttcccagaagccaggggcccagtttgcttcccctgcttgtcctgtgggcacttgcgactcccggggaggcagcagacacggtccagcgtggtcacgctcctggccgcgacttcacctccctcctgcagcacaagtctcgaggaggctggggaggtgcgcgcactgccctctggtggcaacttctgggcccacctgtcattgtgccctgctgttttctaactcaattattcttgaagggatgattgagcgccttttgcatgcaaagtcccgaggtaggcatgaagtagttgggcagtccagatgggggagaaggtgtcgtggatgtggagcccagggtgtcactctacgcgctcccgatccctcccaaggcctaggcgtcctccctccaccgcgggaacggagcaggggtggcacagaactctggtggctgcaatgagggttcaacggttgaatgcgtggagtgcatcttagcttcacttctggcccaggaagcgcaggctccgtgtacaacacacgcagcggtgcagtgccttcaaagggggcgtgtggctgtgtgtgtggatgtgccagttttgggcttcctctcggcaggaggtgggggggcggggaggctctggcgctgagtgccccctttccattgcggtcctttggtgcagtggagggtccccccagtagcaggggcatttccaaggagccaggacttcaagggcctaaggctggaggggccctgtccagtgcaacagagagaccttgagcatgggcggtgaggtcacctctcctggcccagctatcagctgagccggatgtgcatggctcaggtttgcacaaaggaggcccacctgttcacaggagttctggaaagaacacacctgtggcaaagacacacacacgtgcacaccagacaggccatgatctcgctcccctggcgaggaatgacttccttgccgtagggagaattcaggggagtctggccctcttgaggagatgctgtagaggggagttgtggacggttggattcaggatgttttcagctccaagtgtctgctttaggccggtctgcacctgtgtcctccccgcctctgtccttctggcacttgccctgggtaggcctggctcaaagccctcttctcccctcctcccccaaccccacaaacaataataaaattaaattaaattaaattaaattaaatttttaaaaaaagccctcttctccatgaagcctgccctgaagaggcagctgcccaggagcatctgcacatctcatacaaactttagctgtgattatattgcattcgttcccatgcctatttcctgtccctgcagctaaactctgggctccttgagggctgggtggagtcttgggcatcttttgtggctgctataactcccagccctgagccaggataatacagacgcttgacaaacgctccatgctgactggcaggtgttcctaccttccatgcctgggaaaatcatgattcagactctccctggagaggccacggtcagagaaacattaggaaggacagagtgggttctggaaggccagaggcacacggccagagcaggcacagatgcggccagccatagctcaaattctcatggctctcttcttccaaaggtggcggcagcctggtagttaggagcatgtgcttaggagccagatggcccaggcccacatcccatctctgacacttatcacctacctgtgtgcggccctgggcgagttatttaacctccccgtgcctcagttttttcatctgcaaaataggataagagtcctagtctgcaagtgctgttgtcaggattcactgaggtaacatgcggcctctcaaacttctgtgcacactcgagttgcttggggacgtggtgaaaatacagattctggctcgggagggctgggctggggcctgagcatctgcatttctgaccagctctcagggaatgctgatgctcttgaacctgaaactgccttcagcatagtcgggaatcaacatgtgtacttagaatagggcctggtgcgtagtaagggctagaggagttacctagtacctccctgggaaggctatgcttctagaactttctgctctgtagcattctgccctctgcattcctggtggccctctgctctctggagcctcggtgatgctggagcctctggtgtctctgaggtgggctgttcagagcctccttggtggtctgcattctgggcctgagaagggacagacaggaggtgatttcaagagagagagaaacaggaagaaggcccagtggggagaggtggcttgcccggcccactcacctgaatgtccaggcttggtgtgagcttcacaacttaaaccacacatcttgcagcttccaccatcccccctgcccaccacccccaccacccggcccctcacccctcactcctgccacactgcttcatgcaggaacggcacagatgacttcagccagagtgtcagcagcacctctgggctcaaaccacaggcctgaagccgctgaccacatcctcccgatcaaagcacccccgtgccccctcctcactctgctcccctcctctgaccccttgtgcactggccaggtctcttctgggccctgacgcctggcttagggaggagtgaggctggggttctcgggtacttttggagaggtggaggaggttgggggtgaagtagtggggctgaggggcagggagcgcagagggagaaccctgtgttgacaggctacatggctgactgttgctttccgctctgctctgcaggccgcctctcctcacgcaccctcacgtgtgatacaggtgatggcctctgggctgtttccagaggtcccatgtgcaacccacagaaatggtgtgggaacagcaaagcaccttcgtgcatgagcagcagccatggcactctcggcctgtgctgctggctgccacctgagctccactttggggccgtttctcacagagcagctccacgcactgaggaatgagctggtctcagtttcctccagcctggcccagtaagagggtgacaagcctggggcccttcgtcccctgctgctttcaggtttgctcatgagttcccggaggcccatgaaatcaaggtcacaggctcaagcccatgtgggtggtggagacgagcatccctctgctccactcaggtagcagccccgacccttcctggctttcccccgaatggggggcctcagggcgggggtataaggcatcctcatgccaggagcccctcccaagggctgagaagagtccctcctcccttgagggaggcaaggtgcccagtttggattcctccaatcagaggatgactttcctggaagagcttctgggatcatccaacccaagccagtccttgcggggcatctttggttcctgcttgctcagtaggcatcaggcctcctgcttctagaagcggcccccccatttctctttggggtatctaccttcctgcatttggtgaagtcttggttgaactctcaatcaaagtaccccaccctttccagctggagggtgggcatttgacgtgatcttagccaatgagactctttgaattctaatgaatgaagccagcaaacagctggaggttggtgcctcaaaggggtctctgcagctggaccacactcagctgcaggtgcggctggtctggagtctgcccgtccctgaggtctgggtcttcagctccctccagaacctgagaaccactccagatcctctaactagttctgtttggctcaggttagctacagcctgttcctgcggtctgtagctccagagcagtgatgactgcagggagcgaccctagtgagttggaggcactgctggggctcaaacttaggtctccaaaccctcagtccagtgctcatgcccctggggagaagcctctggcctggggacaggggtgggactgaaatgaagtggaaccgaagggaagaaatgagtgttctcatctcatggtctggtgctggggtgtgggtgttggtggtttggctgctgggcagagtgtgaggaggtgtatagaactaggcaggcaggggtaggatgcggtcaatcagacaggtagcctttggccctcacaatcccctgcctcttccccagtacccctggcatgtggtaggatctctgatctggggtagaggggtggggtgggggtcagggatttggtaaacagagcctgtgcctgacctgattcagactaaccagaatgggtttgtgactccgtgtggtagaggcttcacagtgggactgtctctaactcactttgaaagtgaaaccagccactcaccaaacatgggggcccctgctggttctgaaagctctggcagcctctttattcaccagtcacccgaagtataaaccagttagcaagacagcttcaaggtcagccagccaactggtgtgtgcgtgggcctcaccaggccttccaagtgcgcatttaggtagccttccagcaagtcggtgggctgtgagctcagggtcagctctcccccatgtttgggtcacctaccccaccagtacattaggcagaggaggtttttatcaaagacctcccgtactgtccttgagcatccaatgctcacactggcaccagggcctgtggtacaacactggtcctactccaaggccccgcagacagaaaaccgtgggggcgggcactcttcccctcgctgccctctcactcgatcgccatcacccaacgtggtcagtcattgctgtaattaaagactatttcaaatctgagatctgtactaaatatatgcatgcccctgtacttggctaaggcacctgtgtcagccaggaacttcagttgcaaaaactctactggctactgtcattagaaaaggaatcattcaggatattctgaagctcaggaatctctggcaggacccgcaaatcaggcttggagaagcttggagaagcttggagaggcttggagaattgctgcatcctggacacgatgttccgacaccaccctcgccagcctccaggtcctggagttgaggcttctgattggggaagcctaatcacacgcacacacttcaggactgaggtctggagctgaggcttctgattgggtgagcctggtcacatgatcatattcccagcctgtggtctggaacccaggcttctgactgggggaacctggtcacatgccctcccagtcagcagtctggagctggcttctgattgggggagcctggtcacatgctcactttcccagcctgtggtctggaactgaggcttctgattgggggaacctggtcacatgctctcccgcctgaggtctggagctgaggcttctgattgaaggaacctggtcacatgctcactttcccagcctgaggtctggaatggaggcttctgattgggcagcctggtcacatgcctatgtcccagctgcaagggaggctggaaaagcagtttcagcttactggttagggtaggagactcctaaaaaaggagataactccaacacaagaaagatttgcaaagatgcagcgcacccagatgtaaactaaatatccaggacagcacctgagaagaaacagggctggcagagggtccctttgtcaatgccaccctcagctgcactcctccctctgaaagtggcgcttcctcacatatgggccggctgtggtggtggagttttgttgcatgtttaagttagaattaatggcgagtattttaaatgggaggttttcacgtttttttgttttggtttctttgagatggagtcttgcctgtggcccaggctggagtgcagtggcacgatcttggctcactgcaacctccacctcccggggttcaagcagttctcctgcctcagcctcccaagtagctgggactaaaggcatgtgccaccatgcccagctaattttgtatttttagtagagatggggtttcaccacgttggtcaggctggtctcaaactggtgacctcaggtgatccacctgccttggcctcccaaaatgctgggattacaggtgtgagccaccgcatccagtcttttgtttgtttttttgagactgagtctcgctctgtcacccagtctcgctctgtcaccacgatctcactgcaacctctgcttcccaggctcaagcgatcctcccaccttagcctcccgagtagctgggattacaggcatgcaccaccatgcccggctaaattttttttttttttttttggcatagacagggtttcggcatgttggccaggctggtctcgaattcctgagctcaagcaatccacccgccttggcctttcacgtttttaaaaataccaattttagcttcttttgcaaattgagtttcctggtagtatggtgcagacatctccatctgccatttctcctgtagctggagtctccaatgtgccatggtccccacctgtccacctgatgtaaattcacttcctacctggcccccatgggcatctcagttccctgcccaaaccctcccagaaggagagactaggcttccttagtgatcatgctgcgtggtactggttctgttagcccccaccttctcctgtacccactgggcctgcctggagaaagagcgaggccccgctgaatctcatacactccagtgatgctcccttagccacggataagctgccatcccgctgctccccacagggagctgccgtcactgcatcagccaatcagtgtcctggccagtcagacactgggttgtgttgtgttcttaatcagtaagggtgtgcctggttacctctggccatggatgtgaagagtctttgatgttgggaggtcaacagtaggatatattttagctaactgttgattgtccaaaaatgctatttactcaaggaggtctttacaatgcagtggccctcgcaatgtgcccacaaacctgtatacgcagaaatgatatcaagagaatcatgttttaaacttggctgggaacaaggctgggcactatgtgagcacacaggtggagaaggctttgggctgcagatgcagggaccatgggaataacaacgggtggcccccacgccagcacccctgagtgccaaccaaagtggggggtccttctccatgaatccttgtcactggtcaggcacttttgggggctttgccctagtccagaacttcccttctgcaggctcagttcagccccttcgttctggggagggcttcctctgcatcctcactgtggcgtgtttcaggatctgccaaaatgcacctgcctctgtcccctcggcctcaccttgtttagattcttgaagtggtaatggaacacaaatgctaggactccaagaggcagagaccaagaggcagaggttttacagtttctctctatatatgttgtagggccaggtgatacccagatctagcctgccttgctccttcccccttcctgaaatgggcatctttcccgctcggaggagttcagggtcccctgttctcagcgagcccagggtggccgcttctggtgccaggcctgacggagggcatcgtcactcttgagtgagagcatgtttctgaccccattttttgcttttccccaagcagactttgcaggcaacggtgacagccaggcataaccttcttagagggacattttaattttttccgattctttaataaaaacactaagaaaaaaaaaagcaagcaagtgttacttcttgatagagaggaacttctcacagacacttttcaaacatcacacgtcctttttcctcacagcaacacctagattgtcttctgagaaagatcgcagattttggtgaaacctgcccaagaataagaaaaagcaaagagaatgttttcactctacctgtttcccacaggaaaagcggaaaccgttgtgggtactggctttcttgactgtccccatcacaggacactggcctggctgtgaggagacctgggttaggagtccgcctttttgccaaccagcgttgtggctgtggacaaaatgctttcctccctgggtgctctcagcatagtgaagacggcggaggatgggtggttccacgggcctggtgactcagggacagtttcaggtaggaaactggctggaggacttggctgctagcagtgtccagggattcctgcctgagtggctcagtgcaggtagatgctagttcacagacatgctcccacgcaccttcacagacgtatgccacactcatgccttcgaacacagggcttaccgcctttatgtttacctgagcagtggtgcacccacgtgtattctgaacttcgttttttgtctcttctccgtacatcctggagattgctccatatcaggacccagagagcctccccttcctattttttttagacggagtcttgctcagtcacccaggctcgagtgcggttgcgcaatcttggctcactgcaacctctgcctcccgggttcaagtgattcttctgcctcagcctcctgaatagctgggactacggggtgcccaccaccacgcccggctaatttttttttaatttttatttttggtagagacgtggttttgccatgttggccaggctggtctcgatctcctgacctcgtgatccgcccgcctcagcctgccaaagtgctgggattacagacataagccaccgcgcccagccctccccttcctatcttggcatagctacgtggcattccactggatggaagttccctaatttgctcatcacctgtcccctatggatgcgcattttgttggcctcgggtcccgtgactgcaggagttactttgtacacacgtgttcaacatgggtcactctgttgatgagttttaggtgtggaattgctgggtcatgtgtcagagatgttggtagatgtcagattgccttccagggagatgcttgaagcccacgccagcagggtgactcgccttttcaacctgcctttgatggcaaagcttttgaaacttcaaatatgctatcctggtgtttttaatgtgtattctcaggactcttcagggtattagggacttagcacttttgattctttctcttttccttttttccttccttcccctcatattgacactgtccgtatgtcaggtaattttctgggttctggagtggtgtggatgaatcccacactgttcctgttgtccaagagctcctggtgtagactcataagcaaggctctgacatgagatatggtaactggcttgtgcccagaatctgccttggccagaattggagatcagggaaggactggttttaaatcggggagctgattagtctgagtaagtagggtgggaatatggtgaccaactttgtcctaggaatatcactgtaaatcttatgttctggaaacccccctcagtcccaggcacagtgggacagctggtcaccttggcgcgatcctggtaaggaatggcatggtttgcacaagataggagctgctcagggcgctggtgctggtgtggctatgaagcaggcagctcccggatgaacagggaagaacgtggggcttcaggtctggagcctggggggctggcgtggaggtggctgctgtggcaaagcagaagtaagggtgatggcttggaaggagggggtgagggagggaaggagtcagggagaatggccacagtctgtcttggggactggtgggtggggcgcctccagtgaagagcaggtgtcagcagaggggcatgctcggaggacagccctcaggaagtcggccgctagcctgctctttctccttgttctgctctggcccctctgtgggcccctgcagctttgtgatcctcatttgtcatgaggggtaccccacagtctgatggggactgggcggagggtcagacaccaaattatgtataccatagtcctcctgaccagggaccaggactcaaaaccaggtcactggtgaggcctggcactgtgggggcaggactttttttccagctggggactcggctacctgctgactttccagaagacaggtcacagcaccgagcaggggtgggcggaacacaaggacttgagggtgggtgacagtgtcagctggctgagccagggagggcaggaagggaggtggccctggagatactggaggtcttcacaatggcagaggacaggcggtggcagagacagtgaatggcacccccaaacctgctctcccctgcccgtgtgccctctacttatagctggctacatctcccagcctcctctgcagcttggttggctatgtgactcaggcgtagccaatgggatgtacattagaagtggctacggcagctttggggaagggtccttaacaggcagaggcaagccctccctctctccttcctttcccttccatctgcaggaacgcagaggtgatgggtggagcttgaatagctctcttggtctatgaggagatgggagaaggatattgaagagaccctagtagcaagccagatttagctcaggatcctgacatcataaagccaccccacctagcctgggtggcctccctttggacttcttttatgtaagagagaaataaagccctctcttattttaggtcactgttttcttcttctgttctctttggacacacgcagctgaacttcatcctaactgggacactgttgtacagtggaggcggtgatggcagcacgcgggtgagctgaggtggaagttcaaggggtcttggttaacacaggtcagaatgatggcagggtgcaagtgcaggcctgggtgtgggactggtatggagcagttcagagggaacaggaggctggaggctacagtgtggaccctgacatctcctgggaggcggagtggagagggaggctgagcgcaagggccaagcactccagtgagcagagggaggacgggtagggcgtttggcagataccaggactgaggaggatgcagtctggcttggccccaaaaaagacagcccaaggacatcagggctggaagaccccaatatgcccttgtcccatggcccctgtgaaagaggggtctgggtccagtggtgggagggctgtgggactgggtgcatggaaacagagggtatgaggcggtttgttcccagtgggacccatgaagatgcagcgcagagggtcaggtggggatgtggaagacgtaagagaagtagttataggagcaaggcgtggagcctcgtggaggaggctgggtccaaaccccagcactcctgagacccaggtctgggtaggcccaagtgggctctgtcagggctctgccatcagagaagcttctggattacatctcaggttgcctcagagagaatcggatgtcctctgggacagacctaggttctaatcctggctctgccacattctggtaggatgactcatgaggcctggtttcctggcctgtaaaatggcaagggaagagcaggctcagcatgcacaaagccctgacagagtgagaaagcacaggaggcagggtcagagatgaagatggggcagtccctgtaggacatgtgggtcaagactgagagtttggattttactgtgaatgcactgggaaggtttgagtgtgtatgatggggagtggctggggggtgaaatgacgtgatttgagtttgggaaaggttgctctggccgctgagtggagaacagaccagagagtcaggagtattaatagaaacagggagaacagggcggaggccaccatgggcctgctgaggtgggagatgacacggctctgagcagggcaggggctgaagaaagcaggtgcacctctctgcacacccctgctggccacccatgcctctgggcttctgctggcgtactgtctcacccctcctcacctggttttatgttcagctgtagcacctgggggacagactgtatgagtcagagaaaacagaaacagcagtccccaggtctcagaggcccaacaatagaggtttatttttcattcaagttatagcccagtgtgaattgtctgaggaggggtgagggcctgtccttcaagggactccagcccctctacccaaaacttcactggattctggcaggggaggggagagagagaaagagatagagggatggccggccgtggtggctaacgtctgtaatcccagcacttagggaggccaaggcaggcagatcacgaggtcaggagatcgagaccgtcctggccaacatggtgaaaccccatctctactgaaaatacaaaaattagctgggtgtggtggtgtgtgcctgtaatcccagctactcgggaagctgaggcaggagaattgtttgaaccggggaggcggagcttgcaatgagccgagatcgcgccactgcactccagcctggctacagagcaagattccgtctaaaaaacaaaaaaaaaaaaagaaaaaaaaagagagatagagggattaagagacacaggagatcataggtgagattttttttaggcctagaagtagaataaatcacttcctcccacatcccattagccagacttggttctggagccccagctcactgcaagggaggctgggaagcagacccgagctgatgccgggaggagggtgcacgccatggcctggggacccattccaccaggtttccctcctacgtgctcccacaggccatgaggtgttacatagaggatgtgaaggagaatcattctctgcgtagccccctccctgcctctccatctgaggtgttctgggctaggacccttgacaaaagaacaaaccggctccatcccctgtctcctggggtgggagactctgtatgtgggggctgcaccatcccccattctgctccccactttcctggctgctgcacatctcaggggcacgagggtggagagtggcctacctccctcccttggtcctaccccgctggcctgggctgcgcgcctcaggcttcctgtgtctgacctggtctttggggcatctggggtgctcagtaaatgtttgttgaataaataaaagaaggaaagcaggatgaggaggaagaagagtcttgggcagtatgtgccaggcagactgatgctgtctcatggatgaaatagctgtacgcagctgctccttgcaagctgggtctgtgacttctggctttggctgcggatgcatttttcttttctttgtatgtgtgtgcttttaaagttttaactgaattcatttatttgggggcaggaaatatgttcatgccatacaaaagggtctatagagaaaagcgtccttcctaacccttcctcacctggctctcctccctgagacaaccggcgttcctaatttcttgcaaagcttctgggaatatttgaggcttaataaatgttggctgttattctcatggttgtggctgttgtgtttagtatcctctcctgccgccagacagccttactctagaggagagggaagggcagtgtggaaggaactggcccttacagcaagcctgcagtgcgtggtcacattaaatgctttatacacaccttcttgtccagttctcccttcatttggtaggtctgcacactgaagcacagggaggcctaagtcacagcctcaatctccagtcctgcccctcctgggcagcagtgctccacgcttcttcttttccagcagcgggctttgcacatgggagttgggcctgattctctttttggagtcttgaattccacttttctcacatttgcagagctgccgtctctgctcttctctctcttcttctcagaagaggtggcaggctgggcgcagtggctcacacctgtaatcccagcactttgggaggccgagggaggtggatcacctgaggtcaggagttcaagatcagcctggccaacatggggaaaccccgtctctactgaaaatacaaaaattagccgggcatggtagcacgtgcctgtaatcccatctactcgggaagccgaggcaggagaatcgcttgaactttgtgggcagaggttgcagtgagccgagattgtgccactgcactccagcctgggtgacagagctagactatgtctcaaaaaaaaaaaaaaaaaaaaaaagaggccacagcttgcaataaaacccctctgaaacagggaatcaggaaagggaagaagcagagctgctgcttctgggctctgaggatggaacttcacagggtctatggggctgtgatgtagcacgtaaatagatgtgcatttttctaaagaccaatccataagtttccatcatttaaaaaaaagagccctgagctgagctcccacgccacccttctcccccgccaaaaaagggggagaagggttaggaaccatgacttgagaggaagaggaaggttctagaatgttcagtaagtgaccatcaaattgttcacaaagacctgatagtcatctctgggaagtgctagctagaacaaacagacaagagaaagaagtaaagggcatccaaattggaaaggaagaagtcaaattatccttgtttgtagacgatattatcttatatttcaaaaagcctaaaaacgccaccacaaaactatgagaactgataaacaaattcagttaagctgcagaatacaaaatcaacatacaaaagttagtagtatttctatgtaccaacagcaaacaatctgaaaaagaaatcaagaaaataactccatttggaatagctacaaataaaataaaatacctaggaataaacgtaaccaaaaaagtgaaagatctctataatgaaaactataaaacgttggtgcaagaaactgaagaggacacaaaaaataaaaagatattctatgtttatggattggaagaatcaatattgttaaaatgtccataccacccaaagaaatatacagactcaatgtaatccctatcaaaatactaatgacattcttcacagaagtagaaaaaataatcgtcaaatttatatggaaccacaaaagatgcagagtagccaaagccatcctaagcaaaaagagtgaaactggacaaatcacattatctgacttcaaattataccacagagctacagtaaccaaaacagcgtggcgctagcgtaaaaacagatgcattgaccaatgaaccattggtcagaatagggaacccagaaacaaatccacacacctacagtgaacttattttcaacaaaattgccaaaaacatacctttggggaaaggccagtcttttcaataaatgttgctgggaaaactggatatccatatgcagaagaatgaaactagaccctcatctctcttcatatacaaaaatcaaatccaaatggattaaagacttaaatctgagacctcaaactatgaaactactaaaaggaacattggggaaactctttaggacatgggactaggcaaagatttcttgagcaataccccaccagcacatgcaaccaaagcagaaatgatagatgagatcacatcaagttaaaaggcttctacacagcaaaggatgcaatcagcaaagtgaagagacaacccacagaatgggagaaaatatttgcaaactatctgacaagggattaataactggactagataaggagctcaaacatctttatggaaaaaaattatagaaatcccatcaaaaattgggcaaatgatctgaatagacagttctcaaaagaaaacatataagtttatgaaaaggtgctcaacatcattgatcatcagagaaatgcatgtcaaaactacaatgagatattatctcacctcagttaaaatgacttttatccaaaaggcaggcaataatgaatgctggtgagggtggggagaaaagggaactctcgtacactgttggtgggaatgtaaattagtacaaccactataaagaacagtttgaagagtcctcaaaacactaaaaatagaactactatatgatccagcaatcccactgctgagtatatacccagaagaaaggaaatcagtatatggaagagacatctgcattcccacatttgttgcagcactgttcacaatacccaggatttggaagcaacctaagtgcccatcaacagatgaatgaataaagaaaatgtggtacatatatgcaatggagtactattcagccatgaaaaagaatgagatcctgtctttgcaaccacatgtttgaaactggaggtcattatgttaagtgaaacaggccaggcacaaaaagacaaagctcacatgttctcacttatttgtgggagctaaaaattaaaacaattgaattcatggaaatgggaagggcagtgatggagatgggaagggcagtgggggttggaggggtggggattgttgttgggtacgaaaacagaattagatcgaatgaataagatctagtatttgatagcataacagggtgactttagtcaacaataatttattgtacatttaaaaataactaaaagagtatacttggattttaacacaaagaaaggataaatacttgaggtgatggataccccatttaccctgatgtgattattatacattgtatgcctgtatcaaaatagctcatgtgcctcatgaatatagacacctaccacatgcccacaaaattaaaaactaaaaaaaacagtcatctctgaatgctaaacggagtaaggggcttcctggaaggctgggtgaaatgggagtctcggaaagatggtgtgttgcaggctgggaggagggtgagacgctggggtcacctagagggacctgcttgtgtgaagcctacgtattagtgggtatgtgtgtgaccggatggaggcgtcagaggtgttgggtagcctgtgtgagttggcgtgggggtgatgtaggaggggagagagggagggcctgcgttcccttggctcctgtgtgcagctaggcccctatttgacaatgtgtgtctgtgtgtgtgtgtgtgtgtgtgtgtgtgtgtgtgtgtgtgtgtgccgcccccagcgtaggaggcagatctttatctggccctgggtgcttgaggagtttcaggctttctcataagcctcgtctccccgcctctccaccccaggccttgcccctctatcctctgcacaggaagtgggctggctctgggcttttagtctttgcggccccagcagccagagctcagcagggccctggagagatggccacggtcccagcaccggggaggactggagagcgcgcgctgccaccgccccatgtctcagccaggtgatgtccccctgcctccctcccggcccctgtggaccagccagagggctgggagtgaaagtcacagagaagactttcagctctgactcagttcccccagcagtttctgcctgaactcccatcccccaactttgtcttagaattcccctagggaggggttgggcccagctctcatggctcctggctggaggaaaaagcggtccccagtcccaggtcagctctccttcccaacccattcaggggaggctagggactgctgtgggatgaggggcttccctgggctctgtgtgctgggcccccaacccggagaggtggagaagggatgggtggatagcctgggtgcccggagagggtacgggatatggggtgggacaggcgggagccccctcctgacctctgtggagtggggcccatataccgggggaggcagccctgtgttgcgtgctcatcaggaggcttgtggagtaagtggggacagaagggtccccttggagagccatctatgaagtgaagttgctgcgaggcctctgggagccccaggctggaggcagagccctgggtttgagtctgggtttgtccctcccttggctgcatgactggacaggtcagaagcatctccggacattggggatgggaccctatctttggggctgcctggagctcatgctctctcctctcctgggggccgaagcctcccactcttaactgtgtttgtagcacctcgggggagggaggtggagtgaggagctgagctatccccaagggtccccttccttcccccacagccagggtcccgcacccagctggagaagcccctgaagttaaatagcaagagacaagcactgtgtatgggagcaggggggtggcaggtggaggtggccagagaggacgaggggacataggccccattgagttcagaggtcaagttggatgcaccatgggctcccgagctcctgctttaccaccctgccccagccaccatatacccctgatggcagcaggggccccgaactgcacctgaccaggttcaaatcccagctctatgcccttctcgcctgggtgagaggttgacccgtttcttagtctcctcatttggcaaaaaggaggcatactagagcctcctcatggggctgtagggagggctaaaagctgaactacccccgagcgctcagggcaggcagtgtaggcagagagagagcaggcaccagtccctgtccccagcagcatctctctgaaaatcagatggctggggtcagccgctccgggcttcagttctggcatggatcaaatggggcagcaagacccaccttgcagggctgtggtggggacgtaggcatccgtgggtgtgaccagtttcagagtcatgaacgacagggcacgtgtgggtgtgcctgaggacccaggagggggtgctcaaactcgaggtcctgggctccacttgctgtcacccgaggctgggcttctcctcaccgtgcaaccttaagtgggttccttggcctccctgaggcacagcttccccattgcagaatgagggtgcagcctcagtgactgccaggcgctccctcagctctgtgcccctctggcacccccacaccatcctcccgtggactctgccctctccgagcatcgctgcacctctgagctccaggcggcgggaagcagactccagatggcgctttctcctcctgcccggctgcctctaggctgggcctgtggtttacccctaaccttcctttgaccttgcacccctttgtccctcagcaccttcctcacacactggggctctctgcagttcctgtcctgggcatggggtcatcctgaggctgggcccgacctggggtgacacccacacaaaacattgatggtccccttgccccagggccaggttggcatgattgagcgtgaaggggcataggggctatgggagtcccctggttgggctatgcactctttggggtcccaaccctgtgccctctgctattgggggatcccaagaaagaggtgagcagcccccaccctggggagctcaccctcctgtggagacggtaggccaggcaaaggcgagcccatggtaccccgaataagcacctgccagtctgtctgtgagctgctgggtcctgactcccaggacagagagggtggcagccttacctctgggaccagtgtctggcagggtgggacagcatgagagagtgagcctggagccctagctccacctcttactgtgtttatgaccctgggcaagttaggggcttggagccttagtttcctcatctgtagaatgggataataaagccattgggcagcttagacgagctggcatatgtgaggcacttggccccaggcctagcatagagtatgtgctcagtacacagaacgagtattattagttcaccagtgcatatttactgtcgtgtgagctgtcgtggtgggaagatgcgtctggggagttccaggaggggaggatccctgcctgggcactgggcagtctgccctgactcagattccagaaaggcctcttatccactgcatgaccttaggcaacgcacttcacctctgtgtgcctccgtttcctcattggaaaatggggataataagagtatccccgccagaggccctgattgctgcatttaaagagttttaaatggagcctggcttacagtaacctgtcagccgatggttttggtgtgattaagggggtggcagagcggcgtggagttgggttctgatcccagctctgtgctgggctcctgatgtaaccttcagcaagtctttcccacttcgggacctcagtgttctcaaatgtagaacaagggactgtgcttgctcagagagcctttgcagctttgacagtgcgtgggcctctgactctcactcctgtgacatctgccttaggagatggaacccatggctcttggggccagggtgtgtgtccctgctccatgctggctctgatgtaagccacgagacaatccagggccacctaaagagctctgctttttttttttgccgtactgaggcctctgaccacactcattcatttcactacatttattgagcaccgactgtgtgcccggccctgtgctcagcagtccctggagcgagtgtgctggtgggccagcccctggtcaacgccggccctgctgctgccagcctagagggaggagcaaggcgctcagaagaggaagccctcgccctccatcacggaaatcagggaaggcttcatggaaaaaggcatgagggcccgtttgaaatgggcttgaaggatggcaggatctgtaggggacccagggaaaggatagacttgggaaggacctttggagggtgagtgtcggtttcctggtcacctggagccactggcttgtgcaggcaggtaggtgcggtgtgtgtgtgctttggcctgggtacatgcacctgctcctgtgagggcagggtctggaagggtgggctgacctcattccggtcccagaaagcctcgaaaatgggaatttaggctttgattgcaacagggccactgcaggttcctgggcagggatgtgggtggttggaggcgggcttcagggaaggcaggtgagagcctgcagatggggtggtgccgttgtctgggctggaacggcacgaggctggcctggtgagggtggggaagagacaacaagtagtcactggagtgtcctgctgtctgaggagagtcctgactggctaggtatgggggcaaaggtcacctggaataggaagggtacagttgtcccagaactgaaagtcagacaggagaagagctggggatgagctgggtttttgccgggtccaggagcatcccctgtgagggggtcctgcagaccatcgggagggacgtggaggcttggggctgagctggagaaagaccctgggaagctgagggctggagccagtgagaggctcaagagagagaagggaaggggagtgagagctcgagtttggagccgctggagaagggggaacagcgggggaaatgcccaacgctcaggagccttggaagctctcgagatggaagagcaggagggagggaaggatgttccacctcctccacatctcttgactcacctgctcctctcccctctccccctgcccctctgactgaggctaccctcatctttccctggaagctccctcctcatctccctgcctccccctttgcctgctccaaacacctctcctggaagcagtccccttatcttcccgaagtgaccatgtgctcactttctcattcccctccgcacacccagcccctgcagagggtgggggcagctacttttctttcccatttccgctgcgacagttgtggtcttgcctcacgggagcttccacggttggctagaggttccctgagaagcaagtctttgtctcaaaaaaaaaaagtaaataaataaagcactggccagtggccagtgcataataggcactccgggaaaacttttgagcctccctctgacagggctggcttagagatttcatgtctctttcctccctggggtataatctgggtgaccaacctggccctgcctccagggagcttccaggcaggtaggggagtacgagtgtggacaaggtcctccgtaaaggctactgcagccctctgtgcctcagtttcccctgtcctctagggctcttcagtgtttgggtcagagctcctatctgcttttctgcttttccgagttcgcgtcctgatgccttcacaccattgcctcagctccctcgagggacagtgaggggcagaggcaggggctagcctcagagccctctggaagcccctctacctgctgactttagctctgtctatatttattccatcacttgtttgttcaagaattttttttggccagatgcctactatgtgccaggcactgttctaggaattgtggacctagcaatgaacaaaacacaaaaatacctgtccttagtgagcttacgtgactctgtgtgtgtttgtgaagagagatagaggaaaacatgaatcagtcaataaacgatgaataaataatgctatgatgaaaatgtaggggggtggtgagtaacaaagggtgcttcttttatttttttctttgagacagagtcttactctgtcgtccaggctggagtgcagtggtgccatctcggttcactgcaaactccgcctccaggttcaagcaattctcctgtcttagactcccgagtagctgggactacaggcacccaccaccttgcccggctaatttttgtatttttagtagagacagggtttcaccatgttggtcaggctggtctcaaactcttgacctcaggtgattcgtctgcctcgacctcccaaagtgctgggattacaggcatgagccacacgcctggccacgacgggtgcttctttatgtagtctagtcaaagaagacctctcaaaggaggctgcagttgagcagaaacttgaaggaagggtgtgagcatgtgtagggtggtgggattagcaggtgcaaaggccctggggctggactgagctggcaccgaggagtgcagaccatgcacactgagggggcgggcccagcctgcctctaggggcagcgaggcctgggatgtgtatttacgtgtgctctctctttctcctctcccaccagggcttccttcctcggctccaccctgtggatgtaatggcggcccctgctctgtcctggcgtctgcccctcctcatcctcctcctgcccctggctacctcttgggcatctgcagcggtgaatggtgaggaccctgacatctgaacagctctgctttccctatggagagatggctaaggccctgctaaagcctcttcccagaaggggatggggccagagaccaggtgtccacctcctgcctcaccctctgtcctggacccctgccctggcatgcatgcatgaatgcgcacacacacacacacacacacacacacacacacacgcctctccaagccacaggcttgtgctactttctgtccctgccttgccttagtttgcctgtaggaacttgcaggctctggagctccatttcctcctctctgaagtgggtccatgaatcccttctccgcttgccagagttacccacctcctcctctggcaggtgtgggtgccaggtgcaggggcagtgggcgtgtcttgggggggctgtgggcacctacagtcagcactcacacctcatcttgcccggcaggcacttcccagttcacatgcttctacaactcgagagccaacatctcctgtgtctggagccaagatggggctctgcaggacacttcctgccaagtccatgcctggccggacagacggtgagtccactggccacactgcagaatcttaggatggtgggatctcatattctggatcctatgcactggactccaaggagtcaacgtttacagaatcttggactaatgggacccacagactttttgaatcacaggagttggggcccaggcctggaatcaagggatcgtttaagagaatttgggagtcagctatttagacttctagaacctgggtggagtccaggctgcagtggaggggctggggatgaactggacagggtagtttggggacactgagctgcaagcctgctatgccaaggctggactccactctagaggcaagcagagaggaagtggggagaaaggagggtccccaagctttttggataagctcggattttgagagaccctgtaggcagctgtggggacagggaacctgggagtggtttgggtgcctggtggatgggagagagatgtcactgtgatgtaaacatccaggcggccagtgagtgagggactgaccccaggtaggcttgatggggtcagggagaagaggaagaccacagagaggtggctgggcccaggtggattccatagggtgtggggtgggggaaaatggggagggagatggaggggtaaggcaggttcgggccctggcttctgggtgggtggtgattccacacggctctgaaggcctaattaaggatctatcttcatcctaagcctcatggagctttggagggctctaggtggggaggactgcctgtcttgaagtggtttgtgtttctagatcactccagctgccgtgggaccaggctgggatgagggagcaggacaaggtgcccatgagggaggaatgccatggagccagtgggggaggcagtgcccctcacagtggttggcacaggggccccagcctggccttgctgcctggtgccatcctggcagcagagagatctgagaagagtcccttgggccagctgtgtgggtccttcctgttcttctaaagagggtcttttgccatgaaaggcggtggaaccaaacctgtgagctgctccccgtgagtcaagcatcctgggcctgcaacctgatcctcggagccccagatgtgagtagcccacccagggagagagtgcagggagagggtggtctcccagctccgggctgcgatctcagggtgggccggatgccaggggaagagctgaggcccaatggctggggctgtggctaagcaggatgcccagcgctgagcaagaggcagagaaaaacaggtgacaccccagggagtggactcaggcctgccccagggccgacggaccctctgtatgtgaggcatctgccattctgcctctgctcctgctgtctcccctgcgctttgtgggtcctgtgacacttgtgttccttatcaagtaagacagcactccagtaactgtaatgaccacacccagctcttcccgggggcttggcagtgcagtgcagtgtggggggtgaagggtgtagactctggagctggatgctccagccctggctcaccagctgggtgacattgggcaacccctgtgccccagtctccccttctgtaaaatgggcataataatggcacctaccttgttgggtcaaggcccaacaagggccttgtttttcaggccctccccagcctgaaggtgggacctcaccagggacccgcctccttctgcccaggctgctcgggccaaggggcacctgcaggccagtgccaagctgtcccctgcacccccgtggcttcccatccccctgtgctcattggtgcctaaagtccagagggggccgaggcagctggggccagtgagtcagtgctgcctcgagcgtgccaggctgtggtagtgcctgggcttggtcccgctctgagattggagtgggcactggagcaggaggaggccagacagtgggagcagacacccctgagcttgtgggggcagtagagatgcctgggtcctggcttgggcagctgcagctgccccaggagagctcctggctacctcggaaggggcaggggtcccgcttgtccccgactcacactggatccacagagtgcgtagccccgactgtgcctccaggatcagatcgggtgccagaagcaggggagaggccaagcagtgggaacagacagctctgagcctgcggaggcaaggggggatcttcccagaccctgagagtgcagggatgcctgggtccacagccacaacttgggtagctgcagctgtgcccgggagggtgggtctcctgcgtgctccctgcttgcaagatcacctggaggcttgggtttggaccagggcccctgagagtgcagggacacctggctctgtggccacgacttgggtggctgcagctgcgcccaggagagcggggctcttgcctgatcccagcccccaacagcaccaggaggcctgggtccacagccaagacttaggcagctgcagccctgcctgggagggcagggctcctacctgctccgtggagcaggagaccccagctacgcctcccggctgcagccagagttttagcagcggccactccggatgggcagctgcggccttcacctacagccccatgggtcaacatcagcactgtccccttcttaccaatgaagacactgaggctcagagaggtatggtctctgcccaaggtcacacagccaggaagtacacagctgggattgaacccaggcctgcgggctcccagttcaggcttctcaccgttgcattaggctgcctcttgcagggcatatggccatgtccatatgagtgtacatcaaattattgtctgtcaaagcctcctgggcggcagcgggctccaaggacacccggaccacatcttccatcaggttatatgtcttcttgaggggcaggagagtgtgaagatggagtcacacagtgtagctgataaaatcacagcctctggaaccggatgctgttccccttgcagggagctctgtaggtggcctggtttctgatcctggctccaccatttcttagctgtgtgacctcaggcaagtccctaaggctctctgtgcttcagtctcctcagctgtagaatggaaatagtgacagtgcctgtgcccaagttgagagaattaaatgagacaatatatgtaaagtgctctcaagagtgcccggcacagtgtgagtgatcacgcgaatgtatgattggcaatatttttataacaataatagtaataataataataataataataatgagactactatcatcggggaaaatctagcccccatagcagctataagaaggctaggacagggtctatagggtggagaggaactggccagtttggggaattccaacgatcaggtttaaggtttgcccatagtgggtcttatgcagaccagagggacggtgcccaaggtcccggccctgaaatcagcatcctggaccccagatcctaagaggcctgcactagagcttcctcccgcagggctgccgggctgtagggttggcagctgcacagtggcaggatgccttaagctgctcactcggcagccctctgtcaggcatgacaagccaggactcggagatgcagtcaccctgtagggggacacagagggcctgggtttaaacttgggctcccctgctgttcatctgcatgacctggcgcaggtcccttgaccagcccaagcctcaggcttcccacccataccatgggatggatgctgtgtgcattgaggggctaaggcatctgagcagtgactgctcataggaaaatgctcaatacctggccattttcttccagaaaattcaaggcgtagggatggggagagataggggaggggagggcctttcacactaaaaaatgttaaacaggtatagttccagaactgtacctttgtgggggcttaccagcttgcatgcctcctgtaacagggagctcactccctctcaaggtagctcacttcattttagatcaagtgttggtaaactaccttgacccataggccatatccagcccactgcctgtgtttctaaataaagttttactggaacatggccctaatattcatttacatgttgcctatgtctgcttcatactacagtggcggagttgagtcatcgtgacagagaccatgtggccccataaagccaaaaatagttactatgtggccttttacagaaaacatttgctgcccctgccttgggtggcggggcatgtggagaggctgccatccttcccaggtcatcccggtggcctcccccttcccctgcctgaagctgctagaagtttcacccctgccctccttcccttgcagtctcagaaactgaccacagttgacatcgtcaccctgagggtgctgtgccgtgagggggtgcgatggagggtgatggccatccaggacttcaagccctttgagaaccgtgagtgaggaagccagggtggggctggggcagggctgggcacctccttccttccacctcctctgggatcttccctgctccagcctttctccccggcagcttccacacccacatctgatcacctcaccgcccgctgttctcgggatgacgtcctggctccttcctctggcattcaaggccgctcaggatccagccctgggcctcctccccggcactcctcctcttgaggcctatatttctgctacagccaaaggccaactctccaaacccaccttgcctatccctgcctctgagcccttgcacatgccgatcccactgcctggaaggccctttacacctggaaaattcccactcacgtttcgaggcttagttgaaagtcacttcctccaggaggccttcctagactcccctagccctttgtacctcctctttctgggaatgtatgtcctgggttgttactgcctgattgtaggtctgtctctttcactgggctgtgagcaccctgaaggcagagtctctgccacccctgtgtctccttgccacgcacccagcactaggtctcatcaggacagtggtctgggaaggtttgttgaatgcctgagcgactgcctgctgaccttgggggccatctccagggaagcagtggggtggaaagtgagagtcaggcctgaactggatgtgatctgactggcagaccatcgaaactttctgagcctgagttttggggagaatcggagtcacctacctaccaggcttgtaaggcatctttgaactgagacatagaaactgcttaccatgtagtcagcactcagcatctgcttatcacttatgtggttctatagagtcttagaagtatagaaactgagattcatttaacttcagaatcacagtgttataatcatcacacttaaaataaatgagatgatccatggaaagctctcaggtcaattgtaagtgcagagaaaagctgccgtgagtcattcatccagcagctactgaatcaagtgccaggtaatcttccaggtgccaaggacacagcagacaaccaagtccctgccctcaaggagctcacagtctgctgggggagacagaaaatgagtaaagaaaccaaaccatatatttcgtaggtcaggtgatgataagcactgggaataaaagtgaaacaggcaagggggatgcagagtggtgagtggtcagggaaggcttctctcaagaggtgatcattgagagaggcctggaggcagtgagggagcgggtcctggggctttgggtcggggggtaggggaggtggtagcatgtgccaggagggaggagtggcaggtacaaagtgggaggtggaggtcatggctgactgctctcccgtaccccctcttgtctccagttcgcctgatggcccccatctccctccaagttgtccacgtggagacccacagatgcaacataagctgggaaatctcccaagcctcccactactttgaaagacacctggagttcgaggcccggacgctgtccccaggccacacctgggaggtgagaatgtggcccagtccgtacctgccttggttcctccttcctgtcctggtccatgtcctgtccctttttcattgtgtcgaggtcccctcagccccaggtggatggtgggtggctgagtccagtgctctttctgcactgcctggggctgcctccccgacttccacgtccttatctagcccccttaatcctggggatccagctggcagcaggttccaggctgacaccagggaaagattcagaaagccaggagataggcagctgcccagccccatgggctttcagaggccagggaagccaaccctccacgtgtcaaagcccatctgctccacatccgtgcgggcctgttgcttattcattcacttacactcatttcttcattcactcaactgctcactcaataaatatttgctgagcacctactatgcgctgaatgatggggagagagcggagggtgagctcagcaaacttccactctcaggaatctcagactggggcagggcaggcaggcagtcagtcagcagatgtagcgacagggtctgggatagtgaggcacccggatagtgataagttccatcaagaaaacccaacggggcaaggaatttgacagtgactggcacaggctacttcagactcaggtgaccagggaaggccccttggacacctgggtgtccagaaggagctgacctgcaaagatctggggagaagttttgcaaaattagaaagacctgccacggcaaaggcaggatgctgctatgtgtctggggagcaggaggaggcaaaaagagtgacccagggtgggagaggtgtgcggagacgtcccactttctggtcctgtggagactagactgcagcggggcacgggtgggaaccagagaccagctgcaggcttgggagagggcggcagctcaggcctggggtgagtgcagcggggagagagggggatggttctggaatggctgtggaggtggaaccaggttctggaggtggaaccagctgattagctgatgacttgggctttaggggatgaccctggggtttgaggccccagcaactgggtagtgagggagctttgggtggcaaggaagtgggggtgcagctggcaggggttgggggggggttctgtgatgctcagcctcctggccctgccatgggaggtgaggtgggcgctgacagtcctgtctccgacccaggaggcccccctgctgactctcaagcagaagcaggaatggatctgcctggagacgctcaccccagacacccagtatgagtttcaggtgcgggtcaagcctctgcaaggcgagttcacgacctggagcccctggagccagcccctggccttcaggacaaagcctgcaggtactggtgggcggcaagggtgagagggggctcaggcaggagggggcggctggaggaggagctgctccattctctccctgcctggggtgagggtatagcagtcagctccatccctcacttgctgtaaccctgcagggggctcgcttttcagacaggaacaggggttcagtgaggggacggggcttgccatgggccttgtgagttggggaggggtcgaaaggctgttttcactcttctccaccctgaaatctccaactcctggtttcttctggggctgggggtggctgctttcacctctcggcctgatctgtgaaatgggtacagtgaccgtgaggcagagctgctgtgaggaaggcgtgtgatgtcccggcagcctggccctcagcaggtctgctgggcgcctgtccctcatcgcaccacatttcgagttcaagcccaagcaagacctggggtcctctaagtggtgcttggagggaggtggagagaggggtgcagccagctggagcccaggctgctgtgggggtggtggggggctgtaggctcaccaggggggcccatgggatctgtctggagctggaggagctcttagaatgccaccgtgtcatttctttttagcatgaaatctggcttcccagaggatgggcttagcagaaccctgtccccagccccccagacgcaggcctgcgtggcagggccctggatgggggtgttggggtgaccgacccagggtgagtgagggcacttctctaacccctctccttgctgtttctcccacccctgggcagcccttgggaaggacaccattccgtggctcggccacctcctcgtgggcctcagcggggcttttggcttcatcatcttagtgtacttgctgatcaactgcaggaacaccgggccatggtaagaaggttctcctccccttccttcatgctcccacccctccaacgtgcacacacatgcacacacatgcacacacacgcacacaagcacacatacacacacacacacacttacatgaacacatgccaccttgccaggtcagattctggaccgaaccccctgctctgatacacccgtgcttcgtctaccctccaaagagtcctccctgtccaaaacctggcctttccctgtgtcgcatccccacagggggaccctgtggaaccaacccgaggggaaggtgggaggtgcagccctccagggagagccccggggccctgtccagaacactgctctcaggactggggatgcccgtgtgcacatgtcagctgtctctgtgtctgggtccccgccggtccatctaggtctgtcattcgcttattcccatattcactgagtacgagctgcatgccaggtacagctcaaagagctgggaacacagtggcaggccgcatgcatgcgccccagctccaggcagctcacggcccagtgggggaaggcagacaatcatgcaggtgtgtaatgacacaccgggatcaggatggcagaggaggatgtcgacgtattgccattccttaggatccatggaaaccagttccaggaccctccctaccccctacagataccaaagctggtggatactcaagtctctgatttttgttttattttatttatttattttttgtgagatagagtctcactctgtcacctaggctggagtacagtggcgcaatctcgactcactgcaacctccacctccagggttcaagcgattctcctgcgtcatcctcccgagtagctgggactacaggcacacgccaccgtgctctgctaagtttttgtatttttagtacagacggggtttcaccatgttggccaagctggtttcaaactcctgacctcaggtgatccactcgccttggcctcccaaaatgctaagattacaggtgtgagcccccacgcccggcctcaagtccctgatttaacacagcagaatatctgcgtgtaacctacacacaccctcccagagactttaggtcatctcctagattacttataatacctaataccatgtaaatgctatgtaaatagttgttatgctgtattttaaaaatttgtattattttttattattgtattgctatgagggtttttttttcctgaatatttttgatcagagattggctgaatccgtgagtgcagaacccacggatcctgagtgctgactgtatcaggagcagaaaacagggaggggaaacttggctggggcgtggccagggctggtttccctgaggaagggatgattctgttgaaatctgtagtgggagcccatggggggtgtggaggggatggggagagtgtcccaggcagaggaaacagcatgtgcaaaggccctgggcaggcaggagggaagaaacttccaggaacagagtgcaggggcgctggtgtggctggagacagaagtgggtggggcaggaggctgaacttgagcctgggcctgtggcggcagtgatgcttcctggggcctcaggctgtggtgaggacctgggccgtgtgccgagcagtcatggagggtttccccagaagtgggacaggatccacttcgccctctgtagccctggctgctgtgtggagcgtggcctggtggagggcaaagcggtgaggaggtgacacttctgaccgggggttgtggccccctgatgagagccctgcttctcccaagaggtttgcaaagcgtgcctagctgtgtcacctcactcgactttccccagcactgggaaggcagtgagtcaggggctaccattgccttttaactgatgccaggactggccagagaagtcagctgacttgcccaaggtcacatagccagttaggagtgactgccgctctcctgaccctcgtcctggagcagtggttctcggcagtgttcggagccccgtttcctctttcctcccaagaagacaagcattcctccacccacccgtcccctccgcccacagctccctgcaggccttcagggaaaccatgtccctgtagagggagaggtcctctcccaggcatgggttcagtggcctccagactgccctcctccttgtcgttcttgcgccccttcagtgctttctccaccatgtcattctcctgtttaacactcttcagaggccgctcactgcgctgcagtacaccctggcccttgagggcctccaccagctgtgtggaacctttgggcaaatcaaaaatggtgcctctttcttcacggtgatgtacacagcttccaggcactcagcttagcaagcagaacatgggctggaattcagcctcactcaccaccacctttcccactccctgcccaagcctaatgcccttgggcagtgtacaacctgaaccaccatccatggcagccctgacaagaaagcccatctcctctctcccgcctcctggttcattccacttcttctagccatctccgtccctgaccactctggcttgtgtgttcacccccatcgacccccacctccccgtcttgtgtagcactgtgctctctgtctccacagaatgaatggtgatgttgcaacatgctttgtgtccatctccccatgagaatgtcagctccttgagagcagggacctcctttgttggccattcttgtctccccagtgcccaacacagcgtcctcccacagtgaacacttagtatcggcggaagaaatacataagtaaatgtggtgtggctccgtgcctggcatccagagctgtggcgccgatggcataacaccgcggtccttccctttctcaccctcctccttccctcctctcctctgtccaggctgaagaaggtcctgaagtgtaacaccccagacccctcgaagttcttttcccagctgagctcagagcatggaggagacgtccaggtaggaggccggggcggggagacagaggtgggcaggggtgtgagtgggatgagggggtggccggttagtagctaattttgtgttttgtgagaggagacaaaacgccgaagtgagcagcctccggggtgtgcatgggtctcttctccagctctggcactttccatctgagccagactgcctgggttctaatcccagctccaccacattctggctgtgtgaccttgggcctatagagcctccctgggcctcagtttccccacctgttagatgaggagaaaaacagtgttactatgtgtcctgccctgagtacattgcctggcacgcagttagtgttcaaaagaaccctatcaggctgggtgcagtggttcatgcctgtaatcccagcactttgggaggccgtggcaggtggatcacgaggtcaggagttcgagaccagcctgaccaacatggtgaagccctgtctctactaaaaatacaaaaattagccgggctggtggcgcatgcctgtaatcccagctactcaggaggctgagacaggggaatcgcttgaacccaggaggcggaggttacagtgagctgagatggcaccactgcactccagcctgggcgacagagtgagactccatctcaaaaaaaaaaaaaaagtaccctatctggtattaccgttgccggtgtgctgaacgaacaggacctgccagcacaagctctctccaccccactgtctgtgcagacatgctctgtgcttctcctgtccctgctcaaaattcctgagcaggctccataacttagcgtggatactaacaagtcttcccgtcactttgagtcacaaaacaccgattcatttttaaagtgccggcccgcagatcagtaacgctctaaactccatctcagattccgtcgtctcctcttccccagcccatgcccccttcaggcaggaagcttcaagaatgaaggggggacatggggggtactttttaccaccctagccccactctaggctcccaagattggggggtggggatgaggtaggggcagagggaggtcaagaagagtggcggaggaggaaagccatgccggaccagagctgtcatgacctggctttggagttctctatcagggctgatcaagggccccttctggaactccttggaaaactcccaagatgagaatatcttagttgcagtgcttttatttatttatttatttattttttgagatggagtcttgctctgtcgtccaggctagagtgcaatggcacgacctcagctcactgcaaactctgcctcctgggttcaaccgatgctcctgcctcagtctcccgagtagctgggactacaagcacacaccaccacacttggctaattcttgtacttttaatagagacggggttttgccatgttggccaggctggtcttgaactcctgatctcaggtgatctgcccgcctcggcctcccaaagtgctgggattacaggcgtgcgccaccgtgcctggccattagttgcagtactcttaatgtgcgggaatgtatttccttaaaattcttccctcagccttgagggtagcaagattcccatctataaaggtattcaagcaagccatggttgcctatgtgtcagaagcatagagattctcccattgaactggttggaggctgcggtagattagctgcatgctcagataccttccagcttcaagtcctgattctatgaacctacaacatcgtgaggtgggagctgcaaaccattccagcttcccatgagggtatggtatccttgggtctagtgtgtggagcggggtcctgaggaagaaggcatgatgtggctgggggttggggatggcaaagcaggccccaccttttctgcatctgggtgagagacctacccctccaccctaggacccacaggggccacaaggcccacccccacttcccaggggatcgtggaacgtgtgtgcgagtgtgggagtatgtgtgaggggcgtgagtgtctcctgaagcccctttcagggcattgtgggcagaggctcaggcccaggaagtagctggccacaggcagtgggcccctggctcaccggcactggccacaggcctggccgctccctctctggctgcacacacagggctgctgtctggccccgcccttgccctgggtatcatgaatctcacccgaccagtgcttcttcctctctgcccagccagcgaccctctttgccatcctcagtttatcctttctgcctctctcagccttttcttttgtgacataactcctggttgcagaaagggggcggatttaattgagtggtgtgtgcacgtgtgtgcatgtgtgcatgcatgtaagcgtgtgtgtgtgtgtctgcggagcagctggctcagcctcagggactctccctggagaggagaactgggcatttgttgctggttcattaattcatctgaaatagatccatgagacccgccatgctgggcacagaggcctggggagcccattgggcctggcccctgtgcttagggggccatagtccagctgctgagggttcccgggacagagggttgtcagggctcccaaactcacccacccgaggcccctgccacaccaccaggagggcctgctgtcccccactctgctgtgcagtctgtgtcttacccgttttgggtgtttacatctccatttgcttacctgatgtctccctggtgacctgatgggtgacagcaaggaagtcaggagagacgtggctgttgtggaaactgaggcccagagaggtgcaggggccctcccagggtcacacagttagtgagtgccagggccagggctagaacccgggtcttcccactccttgccagggctctctggaatcccgagcaactgagaagtgctctgatgggcactttcctctctctggggatgggaggcggagggggtgggggtggggactgcagggaactgggggaaaggtgaatcaggaaaccatcagctcccccaagagacgttcccaccacagtgtaagcggagaccctgggtcccagctctgccgcctgctggtctgtgatcggggccagggcatgtcccgtctctgggcatctgtagggtgaacaggctgtgctctcagtgcccttctgctttggcatgggtggatcgattcccacacttgtgctagtgcccactagacagtctgaggattctctcctttcctgggtccccagcatctagaacggtgccaggctcatagcaggtgtccaataaacagtcactcttgagcaatcagacattcctgggcactactggcagccaggcaggcctgtgctgggctgtgggtcaggcagtgtccctgggctggtggcccagagggcccccaagccagtgggtgggttgggggagtgcggggctataatcagggagagcttcctggatggggcagccctgggccaactgcttcaggaggaggaggagttaggagctgttgagagtccagaggaaggggtggagggtgaaggaagcccccactcacccacccctggcctttctcccaccagaagtggctctcttcgcccttcccctcatcgtccttcagccctggcggcctggcacctgagatctcgccactagaagtgctggagagggacaaggtgacgcagctgctcctgcagcaggacaaggtgcctgagcccgcatccttaagcagcaaccactcgctgaccagctgcttcaccaaccagggttacttcttcttccacctcccggatgccttggagatagaggcctgccaggtgtactttacttacgacccctactcagaggaagaccctgatgagggtgtggccggggcacccacagggtcttccccccaacccctgcagcctctgtcaggggaggacgacgcctactgcaccttcccctccagggatgacctgctgctcttctcccccagtctcctcggtggccccagccccccaagcactgcccctgggggcagtggggccggtgaagagaggatgcccccttctttgcaagaaagagtccccagagactgggacccccagcccctggggcctcccaccccaggagtcccagacctggtggattttcagccaccccctgagctggtgctgcgagaggctggggaggaggtccctgacgctggccccagggagggagtcagtttcccctggtccaggcctcctgggcagggggagttcagggcccttaatgctcgcctgcccctgaacactgatgcctacttgtccctccaagaactccagggtcaggacccaactcacttggtgtagacagatggccagggtgggaggcaggcagctgcctgctctgcgccgagcctcagaaggaccctgttgagggtcctcagtccactgctgaggacactcagtgtccagttgcagctggacttctccacccggatggcccccacccagtcctgcacacttggtccatccatttccaaacctccactgctgctcccgggtcctgctgcccgagccaggaactgtgtgtgttgcaggggggcagtaactccccaactccctcgttaatcacaggatcccacgaatttaggctcagaagcatcgctcctctccagccctgcagctattcaccaatatcagtcctcgcggctctccagggctccctgccctgacctcttccctgggttttctgccccagcctcctccttccctcccctccccctccacagggcagcctgagcgtgctttccaaaacccaaatatggccacgctccccctcggttcaaaaccttgcacaggtcccactgccctcagccccacttctcagcctggtacttgtacctccggtgtcgtgtggggacatccccttctgcaatcctccctaccgtcctcctgagccactcagagctccctcacaccccctctgttgcacatgctattccctggggctgctgtgcgctccccctcatctaggtgacaaacttccctgactcttcaagtgccggttttgcttctcctggagggaagcactgcctcccttaatctgccagaaacttctagcgtcagtgctggagggagaagctgtcagggacccagggcgcctggagaaagaggccctgttactattcctttgggatctctgaggcctcagagtgcttggctgctgtatctttaatgctggggcccaagtaagggcacagatccccccacaaagtggatgcctgctgcatcttcccacagtggcttcacagacccacaagagaagctgatggggagtaaaccctggagtccgaggcccaggcagcagccccgcctagtggtgggccctgatgctgccaggcctgggacctcccactgccccctccactggaggggtctcctctgcagctcagggactggcacactggcctccagaagggcagctccacagggcagggcctcattatttttcactgccccagacacagtgcccaacaccccgtcgtataccctggatgaacgaattaattacctggcaccacctcgtctgggctccctgcgcctgacattcacacagagaggcagagtcccgtgcccattaggtctggcatgccccctcctgcaaggggctcaaccccctaccccgacccctccacgtatctttcctaggcagatcacgttgcaatggctcaaacaacattccaccccagcaggacagtgaccccagtcccagctaactctgacctgggagccctcaggcacctgcacttacaggccttgctcacagctgattgggcacctgaccacacgcccccacaggctctgaccagcagcctatgagggggtttggcaccaagctctgtccaatcaggtaggctgggcctgaactagccaatcagatcaactctgtcttgggcgtttgaactcagggagggaggcccttgggagcaggtgcttgtggacaaggctccacaagcgttgagccttggaaaggtagacaagcgttgagccactaagcagaggaccttgggttcccaatacaaaaatacctactgctgagagggctgctgaccatttggtcaggattcctgttgcctttatatccaaaataaactcccctttcttgaggttgtctgagtcttgggtctatgccttgaaaaaagctgaattattggacagtctcacctcctgccatagggtcctgaatgtttcagaccacaaggggctccacacctttgctgtgtgttctggggcaacctactaatcctctctgcaagtcggtctccttatccccccaaatggaaattgtatttgccttctccactttgggaggctcccacttcttgggagggttacattttttaagtcttaatcatttgtgacatatgtatctatacatccgtatcttttaatgatccgtgtgtaccatctttgtgattatttccttaatattttttctttaagtcagttcattttcgttgaaatacatttatttaaagaaaaatctttgttactctgtaaatgaaaaaacccattttcgctataaataaaaggtaactgtacaaaataagtacaatgcaacaaaatagtgttgatattcattgcctgcggtaaacctgttgtctcttaaaggggaaatgagaagctgctggggagctgtcgaagacatcccagggccaaatgcaaacttcctccttgagagaaaggaaaaggattgtaaagggaatatctttttcactaataggagtcaggactgtctgtcttattctgtgtccaggtatcagctcatggccatatcccacaagtctatgcctggggaaatattgcacttgatgacgaatctctctctctctcctctctctctctctctctctcctctctctctctcctctctccctctctctcccctctatccccctccctccagataggtagatagatgatagatagatagtgtcctgataaaagttggaccagaccagggatggcaattcctggcattcataaagccacactcatggcagacattactaatcaattgcacccatgcacggcagacatttctaattgaacacagctctcctcctgcagagcctgggtgcagcttcagattctgcaatgctgcgctataggcagcccccagttggtcacagctgatagctgatgacatctctggaccgcataattcctcaggttcctaacacaaaaggagctcttaggtttcccaactccgatttcccaggcagggaaaactgaagctgagaggatggagactggaaagctgagagggacctgtgagaggcaagcccagggagcccagctgtccccaccatgtctggtgagagacttgagctggcagggagcagagtcagggccaccttataccgggtgcagatgaagggatgggccagcggtcactgtgtgtcatgcccagtgtggatccgagtgtggatcttgggagaggagacaaagaggaagcagctggaggcaggggtggtggtcagattgcaggaggggcctgggtcagattcaggagacaggagcggcaccagctggggaccgggcagccgctggggccctggagaaccgtcaggtacagagcgggaagcaggaggcagccagggcagatcttgggggtaagagaaaaaggaggagaggtggggggaggggggggccttccagcctctcatgtttcctctttgttgaactaggtttgttattttgcttcctccgttcccccacctcccatctctcattcgaagcaacttcaggtgcctgcatttcccaagtaaattatggtggaaactgtaggcccaggtccaggatgaagcacccaccactgtcctcctcattactgacagctgaaaaaacagaccaaggaggacagtaagaaggggcaagagaaccaatacttccactctacacattgtgccagcatggcctgggcgtcatctctcatcatctggaaacaaccttgagaagcaggtgctttattccccattttgctgattaggaaacaggcccagggaggtggagcaacgcagctgatggttggtagcatcaggattcaaactcaggtacatctgactccggagcttttggcccttagcatacagaaggctacataggagataattatactaatgggaaaatacctggtaaaatttcattctaagcttcctggcagtcaacttcggggggaaaataagatgccatgatccattagtgtgattgtgggagaaaaagcaaagccctttgatagtttggcaggtagatggggctgaacggtggccaggagagaaggctgagggcgatgctggttggtcaggccgaggtggtcttacctcctcctcctccgtaactgctgagcccctcctactgcctccaccctccaagctggtccagtgtccctctgggccagcatttcactggcttctcccacccccaccctggtgacctccgtgccacagacctgacgccatcacctctcactcgtatgcctgctcagcctcctcctcggtctgcctgtccccacagccgcctgcccctctgatccttccacctctgagccctgccaggctgatctggctaaaggtcgtatctggccacaccacatccttgctaaacctccagtgacccactgtcattttcaggataatggctgaggtccttaatgtgatcgtccatggcttgggggactttggggaggtcccatctgctcttatgcctcagttgccccatctgtgaattgggcaggcagattggatgatttctaagtgctctcctagccctgacattctgtggttccaggtgccacatggaatatggcttaaggcctgggctacatgtattttacatcaagagttcacgctggggttggggggtggggatgagagtagggattgcaactgactcatttgcttggcacctgctgatccctgggtttgaagtagccctgccctgccacccaagctatctaccctcaggttcctatgcatccctcagaaccccactcaagcatctctgcttctggcaggccctctgatttgcccccaagtagagtagattacttcctcctactgtccccctcctgagctacctctgttataaccaactgttgtgccgtgggtcagagcctgggctagattctggggatctaagggtgatactaatagctttggaagaacatcaggtagagccccgttagctcaagactttagtcagaaaagccaggcacaagaagactctgaaaggaccttctaattggggaaggagggtggaatgttgggtggagctttagcaagggggctcaactggaactcagctagttttggttatagttgattgaggatggtgcttggaagagagaggaattgttcttgcagattagcagccactatttgacaatttgggctttatcaacaggcagtgggggagggacagctttggggtcaaggatctgtgagagccactgtggaatgttctcggtccttcaaagtcttcgagaactgcatgtattgagcacttagatgcgtcagactctgttataagcacattgatccttccactctctggaagcatccttaactcactggatccttaagcaaatgccatgagggaggtactattcttagcccattttatagctgagcctatggctcagagtggccaagtgacttacccatgatcacacagctagaatgtagtggagcaagttgaacccaggcaatatttagcacccacatggcacagcttcttacagcttctaaagggtgtgcacccctggtatcccacacaaacacacagtgacctaccaagataggaatgacagaggttctaagtcttgttcctcagtagaggcccagaggccctgaggggatggcggtgccgtgtcccgggccacacagtgcgtttggtagtgggggagggagtgttgattaaatttgagctcaccaccagcacctgtgacaggcctgggacatcccctaggctgacttgcttagagacattttccaccaccagggctatgacacactcgaggctcccatcacagagcctggcagaaagtgaggcaggaagcgctgagtggtgagagacgcaggtcgggtagtggaggggggagtgcccagtctacgattccaggaagccaggatgcagacggagggaggagcagagctggcagacaatgtctcatctcccattcctctatttacctggcctcatgctgggcactggccacagagaggaggccggctactgctctgtccacaaagagtctccaaccttgtctgggagggagtgactctggaggacacatacaagtagaccagctgatcacagccctccttcggtgtggaagaaaatcaacccggtcctgtgagcacaagccttgatcaggaaatggtgccagtgaacactctggtggagtcttctaacctggggaggaattgtggaatgccgtgcggggctttagcaagagaggctgagccagagttcaggtagttttggatagctgcttgaggatggttcttagaagaggaaggaattgttcattcattcatttattcattcaacagacatttaggagggcctagtacctgcaagtcacggtgttggggatccagcagcgagcaaagcccccttcattctacactttcagcctttgtggacaccttggggcagtgtggcatagtggttatagccttaactctggagccccgcagccgggttaagtactggccccctcactctggagccccgcagccgggttaagtactggccccctcactctggagccccgcagcctgggttaagtactggccctgctgcctatcagctgtgactttggacaaatacctaagcttctccgtgcctcagttttctcatctgtaaaaggggacaataccaggactgttgtgaggatgaaagaaataattgaatgtggcagggtgctgtggcttgcacctgtaatccagcacttagggaggtccaggtgggaggatcccttgagcccaggagtccaagaccagcctggctaacatggtgagaccctgtgtctacaaaaaatatatacagaaaattagccgggcatggtggtacatacgtgtagtcctagctactagggaggccgaggtgggaagatcccttgagcataggagattgaggctgcagtgagcattgatcgtgccactgcactccagcctgggcaacagagtgaggccctgttacaaaaaaagaagtaagttaatgtaaagtacttaggagagaagagctagccgtgggagagacagacagagacagggctgtgaccagggcagccaggggccagagatgtggaagctgctgacttgctggctggccttttggatactctgttgctgtgttggtgatggctgtttggggcaggggatgagctggacacctgcaggctcggtgtctcctgccacctccctgccctttccaacctcctatccctgacagctcatctccctcaagcacctgggtaggtcttgggggatgatggtttgagataaggcccaaatctatgatgacaagattctaggaggtgtgacaaatgctgaaggaaacctatgaggtcttcttcctacctctcaaatccagccgtgctggctgccacccgcctagctcagggccgaggacattttgtccctcccaattctgtaccacttggcccctttgagcctcagtctcttcatctaaaatggggtgaagaagtgaaatttcaaaggccgggtgcggtagctcactcctgtaatcccagcactttgggaggccaaggtgggtggatcacctgaggtcaggagtttgagaccggcctgaccaacatggtgaaaccccatctctactaaaaatacaaaaaaattagctgggcatggtggcctgcgcctgtagccccatctactcaggaagctgagacaggagaatcacttgaacccaggaggcggaggctgcagtgagctgagatcgcgccactgcactccagcctggacaacagagtgagactctgtctcaaaaaaaaaaaaagaaaaaaaaaaagatagcccaccctgtgcccagtaactactactcattcattctaatctatttattgagcttctactatgtgcactggactgttcaaattggacatttcggtttgagagagctcgggttgcttggaacgggcttgatggtgggtggctggccgtccccggccaacggtccagtgattctcgtaacagtgggtgtaggagagcacccgttacactgtcagtccgagcaatcagccaggaacggtacatgttggcgagagaattctattgcttgtaatttatgcaaatatgaaactaacaatgaaacctttgctgctgggatcccaaactcagatgctgacagggactggggtttgggtagatattagctgcagtgatgaaatgctgacggtgtacacccagtagatgcgggccccgttctaagttcctcacacaggttctgtcaatcttcacaacacttaggcttactgtctcattttctatatgaggaaatgaaggcccagtaaaatcaaataccttgtagctcaagggcatgtggccaaataagtggtggagccaggactcaaactcaggctcctgactctagtaactctttttaacccatgcagtgtgatacaatagggagtggtgaggtctgtgtcaaaccgaaattgctccagggcagccatcgctgattgttgccatgttggggatcagctaggtcatctacttttttttttttttttaagacagagtttcactcttgttgcctaggctggagtgcaatggcgtgatctcagctcaccgcaacctcagcctcccgggttcaagcgattctcctgcctcagcctcccgagtagctgaaactacaggcacgcaccaccacgcctggcgaattttgtattttcagtagagacggggtttctccacgttggtcaggctggtcttgaattcccgacctcaggtgatccgcccgcctccacctcccaaagtgctgggattacaggcctgagccactgcgcaggcctgatcttctacatttttaagagaagctgaaaattcagtttttcctgcaaagtgtccttatttttaaatattggccactcatcttttaaaaacagaaaacaagcaagccaagcaaaatgtgtctgcacggtagagagggagggagaaaggaagagcatcctgcgggatttattgtaaagatcacttcttcctgaccccaggtgtgctggctgctccgtgcccccaccccctgcttgctgagctcagctgcaactctctccagttaacgatcctcgatcctccgtgatccatccattattgaatcccagcacctgccacaggttgttcgttgaatggatgtgtaggttggtaaatgggcaaaggggaggagggaaaaaggaaaaggagaaaggaaggaaggaaaggtgggaggggaagttacttagaggctttgaaaacctggaatgaccaaggttctgagaaaccaacgtggagggaagaggcaacagagccgactggtatcaggagctctctcgggcccaccaagtcaacagctgtctgacacagatgaccaaggagaatagaggtactcggggaacctgagtgagtgctggggtcttcccatgaaagggcagcaggaaagagcctccttggggaaatttaggtgtctgtgaccttggacagggcccccttcaagggcaagagctagtcccacaaaccggactgtctttagaggaggctctgcctgcaatgttttgaggcaaaaaaaaaaaaaaaaaaaaaaaagttgaaaattgcaattttgtgtcctttggaaatttttgttgactctctgcctaaagccttatgtatatggaaataagtaatattgttcttttgttttagtttttagaattcatttttggacagtatactgggaagagtacaggctgggaatcaggtcacctgggttccagtcccagccctgcctcagcattgctgtgcaaccttgggtagtctccacccactctctgggtctggctccctgatgtggtttggctgtgtccccacccaaatctcatttcaaattgtagcttccattatccccacgtgtagtgggaaggaccaggtgggaggtaattgaatcatgggggcaggtttttcccatgccgttcttgtgatagtgaataagtctcatgagctctaatggttttgtaaaggacagttcccctgcacacactcttgcccgccaccatgtaagacgtgcccttactcctcctttgccttctgccatgattttgaggcctccgcagccatgtggaactgtgaggccattaaacctctttttctttataaattacccaatcttgggtattttttcataacagcatgaaaatggactaatatagtccccctatctgttctgggagccccacctgctacaatcccacagtggaggagaaggtcaggctgagtgatgcatgcagagtttccattctgtgtccccaaggtggcttgaagcagcccctcccaaaccccaaacccctgatcagcatctgtaccccgactgcccatctgggaaagaagcgactgggcatgccagggcctggtggtgagtttgtcctagcagcatcttcagacagaggccagaggccaggacccagggctgagacagaggccgagggctcaggagtggtggtgtgggcagtgggaaggaacacagagacaggagaaggtgtcactgggaaggacaactggctctgaagccagagggtcctgggtttgaatccagctcctagcacttcctgactgtgtgacatcaagcaaatcactgctctgaaactccactttctcacctcagatgggtgaagtgaccatttttcttattggagatcaggcctatcctgggtctggttagctgtattgtaagccatagattattctaagccttaggatccttaaatccctgtacagatggaggaagacaagccacagagatggggactcctgagaggtcccacacctgttggtgacaggccattctggtggattcttattcctccaagcacataagaagcatctccatgtactgctgagggtcctgtcctccaccgggtgctgtcacgtggtgggcggggccaagtgcctgccaagcttctgtcccactgtctgtttccctaggcttggcagctttcttcaagggcagcaactgagacttgttctatttcttttacatctttgttcttgttctttcttttttctttttttgagatggagtcttgctctgtcgtctaggctggagtgcagtggtggatttcggctcactgcaacctctgcctcctaggttcaagagattctcctgcctcagcctcccgagtagctgggactataggcgcctgccaccactcccagctaatttttttgtatgtttagtagagatggagtttcactgtgttagccaggatggtcttgatctcctgacctcgtaatccacctgcctcggcctcccaaagtgctgggattacaggcgtgagccactgcgcccggcccccctctctttttattcttgtctaaaatcaaagtgttggcaggctcattctctccctgaaggctctagaaaaaaaatcttccttgctgcttcctaacctccttacatttttatttttttagagacagggtcttgcccaggttggagtgcagtggcaggagcatggctcactgcagcctcaacttcttgggctcaagtgatcctctcccctcagcctcccgagtagttgggactacaggtacatgctgccacacttggctaatgtttgtatttttgtagaggctgggtcttgctatgttgcccaggctgatcttgaactcctgggctcaaatattcctcccaccttggcctcccaaagtgctgggattacaggcatgagccaccttgcccagactccttatcctttttatgttatttttcttgttctcttttgtggctgtgttgaggctcaacaccaatcaaatgaacgaacaagtgaattgcagtagggacaccgtgcattggaaagagatggcagaggtggcctctggggaccctgcctaggtggcctcagaaaagttgcatctattgagcagttcaggctttagaggcctgtgggaggtggaaggaagcaggtcataactgtgattttgggggaggagagtaagatggtggtagctcaggtgtagggagaggacacacttcagaagtgacttgaggactcatggtcatgtggaacctttgggacacttgtccacagcattgtcaacagccagcctgcccctgcctgcctcaccctgcttaatatgggctggattgtgtcaccccaaaagatacattgaaggcctgaccctttaacctatgaatgtgacctcatttggaaatagggtctttgcagatgtgaagaagatgaagtccttagggtggaccctaatccagcatggctggtgtcctttaaagcagaggagaagaggcatggagccacgcacagggagaaagccatgagatggcagaggcagagtttggagtgacgctgtcacaagc

SEQ ID NO: 282 - DNA, 1648 bp, Homo sapiens
ccctcctctgctgggcctgggggtctgggccagcaacaagttagtattgcagacatgggccaaggagccagaggccatgcagtggctcagggtccgtgagtcgcctggggaggccacaggacacagggtcaccatggggacagccgccctgggtcccgtctgggcagcgctcctgctctttctcctgatgtgtgagatccctatggtggagctcacctttgacagagctgtggccagcggctgccaacggtgctgtgactctgaggaccccctggatcctgcccatgtatcctcagcctcttcctccggccgcccccacgccctgcctgagatcagaccctacattaatatcaccatcctgaagggtgacaaaggggacccaggcccaatgggcctgccagggtacatgggcagggagggtccccaaggggagcctggccctcagggcagcaagggtgacaagggggagatgggcagccccggcgccccgtgccagaagcgcttcttcgccttctcagtgggccgcaagacggccctgcacagcggcgaggacttccagacgctgctcttcgaaagggtctttgtgaaccttgatgggtgctttgacatggcgaccggccagtttgctgctcccctgcgtggcatctacttcttcagcctcaatgtgcacagctggaattacaaggagacgtacgtgcacattatgcataaccagaaagaggctgtcatcctgtacgcgcagcccagcgagcgcagcatcatgcagagccagagtgtgatgctggacctggcctacggggaccgcgtctgggtgcggctcttcaagcgccagcgcgagaacgccatctacagcaacgacttcgacacctacatcaccttcagcggccacctcatcaaggccgaggacgactgagggcctctgggccaccctcccggctggagagctcagctgatacggcatcctgcgagaagacctgccctcctcactgggatccccttcctgcctcctcccagggctctgccagggccttgctcagtcccttccaccaaagtcatctgaacttccgtttccccagggcctccagctgccctcagacactgatgtctgtccccaggtgctctctgcccctcatgcccctctcaccggcccagtgccccgactctccaggctttatcaaggtgctaaggcccgggtgggcagctcctcgtctcagagccctcctccggcctggtgctgcctttacaaacacctgcaggagaagggccacggaagccccaggctttagagccctcagcaggtctggggagctagagcaaaggagggacctcaggccttccgtttcttcttccagggtggggtggcctggtgtccccctagccttccaaacccaggtggcctgcccttctccccagagggaggcggcctccgcccattggtgctcatgcagactctggggctgaggtgccccggggggtgatctctggtgctcacagccgagggagccgtggctccatggccagatgacggaaacagggtctgaccaagtgccaggaagacctgtgctataaaccaccctgcctgatcctgcccctgcctgaccccgccacgccctgccgtccagcatgattaaagaatgctgtctcctct

SEQ ID NO: 283 - protein, 276 aa, Homo sapiens
MQWLRVRESPGEATGHRVTMGTAALGPVWAALLLFLLMCEIPMVELTFDRAVASGCQRCCDSEDPLDPAHVSSASSSGRPHALPEIRPYINITILKGDKGDPGPMGLPGYMGREGPQGEPGPQGSKGDKGEMGSPGAPCQKRFFAFSVGRKTALHSGEDFQTLLFERVFVNLDGCFDMATGQFAAPLRGIYFFSLNVHSWNYKETYVHIMHNQKEAVILYAQPSSIMQSQSVMLDLAYGDRVWVRLFKRQRENAIYSNDFDTYITFSGHLIKAEDD

SEQ ID NO: 284 - DNA, 4565 bp, Homo sapiens
cgccggaagtgcaaaggcagtttcccggcgcggctgtggctccgccctccgggcgcgaggcccgggtgggccagagaggcaggtcctcgtccctcgggcccgtggcgctgtcgtggatgaaccctctctttgggtctggattgggacccctttccagtaccattttttctagtgaaccacgaagggacgataccagaaaacaccctcaacccaaaggaaatagactacagccccaattggctgactttggctatagaaaaaagaaaggaacgaaaagagacagttttttttggaaagctaagtcttccctttatcgagtcaagtaacccccccttcttgagctatttacagcttttaacaattgagtaaagtacgctccggtcaccatggggacagccgccctgggtcccgtctgggcagcgctcctgctctttctcctgatgtgtgagatccctatggtggagctcacctttgacagagctgtggccagcggctgccaacggtgctgtgactctgaggaccccctggatcctgcccatgtatcctcagcctcttcctccggccgcccccacgccctgcctgagatcagaccctacattaatatcaccatcctgaaggggcttccttcctcggctccaccctgtggatgtaatggcggcccctgctctgtcctggcgtctgcccctcctcatcctcctcctgcccctggctacctcttgggcatctgcagcggtgaatggcacttcccagttcacatgcttctacaactcgagagccaacatctcctgtgtctggagccaagatggggctctgcaggacacttcctgccaagtccatgcctggccggacagacggcggtggaaccaaacctgtgagctgctccccgtgagtcaagcatcctgggcctgcaacctgatcctcggagccccagattctcagaaactgaccacagttgacatcgtcaccctgagggtgctgtgccgtgagggggtgcgatggagggtgatggccatccaggacttcaagccctttgagaaccttcgcctgatggcccccatctccctccaagttgtccacgtggagacccacagatgcaacataagctgggaaatctcccaagcctcccactactttgaaagacacctggagttcgaggcccggacgctgtccccaggccacacctgggaggaggcccccctgctgactctcaagcagaagcaggaatggatctgcctggagacgctcaccccagacacccagtatgagtttcaggtgcgggtcaagcctctgcaaggcgagttcacgacctggagcccctggagccagcccctggccttcaggacaaagcctgcagcccttgggaaggacaccattccgtggctcggccacctcctcgtgggcctcagcggggcttttggcttcatcatcttagtgtacttgctgatcaactgcaggaacaccgggccatggctgaagaaggtcctgaagtgtaacaccccagacccctcgaagttcttttcccagctgagctcagagcatggaggagacgtccagaagtggctctcttcgcccttcccctcatcgtccttcagccctggcggcctggcacctgagatctcgccactagaagtgctggagagggacaaggtgacgcagctgctcctgcagcaggacaaggtgcctgagcccgcatccttaagcagcaaccactcgctgaccagctgcttcaccaaccagggttacttcttcttccacctcccggatgccttggagatagaggcctgccaggtgtactttacttacgacccctactcagaggaagaccctgatgagggtgtggccggggcacccacagggtcttccccccaacccctgcagcctctgtcaggggaggacgacgcctactgcaccttcccctccagggatgacctgctgctcttctcccccagtctcctcggtggccccagccccccaagcactgcccctgggggcagtggggccggtgaagagaggatgcccccttctttgcaagaaagagtccccagagactgggacccccagcccctggggcctcccaccccaggagtcccagacctggtggattttcagccaccccctgagctggtgctgcgagaggctggggaggaggtccctgacgctggccccagggagggagtcagtttcccctggtccaggcctcctgggcagggggagttcagggcccttaatgctcgcctgcccctgaacactgatgcctacttgtccctccaagaactccagggtcaggacccaactcacttggtgtagacagatggccagggtgggaggcaggcagctgcctgctctgcgccgagcctcagaaggaccctgttgagggtcctcagtccactgctgaggacactcagtgtccagttgcagctggacttctccacccggatggcccccacccagtcctgcacacttggtccatccatttccaaacctccactgctgctcccgggtcctgctgcccgagccaggaactgtgtgtgttgcaggggggcagtaactccccaactccctcgttaatcacaggatcccacgaatttaggctcagaagcatcgctcctctccagccctgcagctattcaccaatatcagtcctcgcggctctccagggctccctgccctgacctcttccctgggttttctgccccagcctcctccttccctcccctccccctccacagggcagcctgagcgtgctttccaaaacccaaatatggccacgctccccctcggttcaaaaccttgcacaggtcccactgccctcagccccacttctcagcctggtacttgtacctccggtgtcgtgtggggacatccccttctgcaatcctccctaccgtcctcctgagccactcagagctccctcacaccccctctgttgcacatgctattccctggggctgctgtgcgctccccctcatctaggtgacaaacttccctgactcttcaagtgccggttttgcttctcctggagggaagcactgcctcccttaatctgccagaaacttctagcgtcagtgctggagggagaagctgtcagggacccagggcgcctggagaaagaggccctgttactattcctttgggatctctgaggcctcagagtgcttggctgctgtatctttaatgctggggcccaagtaagggcacagatccccccacaaagtggatgcctgctgcatcttcccacagtggcttcacagacccacaagagaagctgatggggagtaaaccctggagtccgaggcccaggcagcagccccgcctagtggtgggccctgatgctgccaggcctgggacctcccactgccccctccactggaggggtctcctctgcagctcagggactggcacactggcctccagaagggcagctccacagggcagggcctcattatttttcactgccccagacacagtgcccaacaccccgtcgtataccctggatgaacgaattaattacctggcaccacctcgtctgggctccctgcgcctgacattcacacagagaggcagagtcccgtgcccattaggtctggcatgccccctcctgcaaggggctcaaccccctaccccgacccctccacgtatctttcctaggcagatcacgttgcaatggctcaaacaacattccaccccagcaggacagtgaccccagtcccagctaactctgacctgggagccctcaggcacctgcacttacaggccttgctcacagctgattgggcacctgaccacacgcccccacaggctctgaccagcagcctatgagggggtttggcaccaagctctgtccaatcaggtaggctgggcctgaactagccaatcagatcaactctgtcttgggcgtttgaactcagggagggaggcccttgggagcaggtgcttgtggacaaggctccacaagcgttgagccttggaaaggtagacaagcgttgagccactaagcagaggaccttgggttcccaatacaaaaatacctactgctgagagggctgctgaccatttggtcaggattcctgttgcctttatatccaaaataaactcccctttcttgaggttgtctgagtcttgggtctatgccttgaaaaaagctgaattattggacagtctcacctcctgccatagggtcctgaatgtttcagaccacaaggggctccacacctttgctgtgtgttctggggcaacctactaatcctctctgcaagtcggtctccttatccccccaaatggaaattgtatttgccttctccactttgggaggctcccacttcttgggagggttacattttttaagtcttaatcatttgtgacatatgtatctatacatccgtatcttttaatgatccgtgtgtaccatctttgtgattatttccttaatattttttctttaagtcagttcattttcgttgaaatacatttatttaaagaaaaatctttgttactctgtaaatgaaaaaacccattttcgctataaataaaaggtaactgtacaaaataagtacaatgcaacaaaa

SEQ ID NO: 285 - protein, 549 aa, Homo sapiens
MAAPALSWRLPLLILLLPLATSWASAAVNGTSQFTCFYNSRANISCVWSQDGALQDTSCQVHAWPDRRRWNQTCELLPVSQASWACNLILGAPDSQKLTTVDIVTLRVLCREGVRWRVMAIQDFKPFENLRLMAPISLQVVHVETCNISWEISQASHYFERHLEFEARTLSPGHTWEEAPLLTLKQKQEWICLETLTPDTQYEFQVRVKPLQGEFTTWSPWSQPLAFRTKPAALGKDTIPWLGHLLVGLSGAFGFIILVYLLINCRNTGPWLKKVLKCNTPDPSKFFSQLSSEHGGDVQKWLSSPFPSSSFSPGGLAPEISPLEVLERDKVTQLLLQQDKVPEPASLSSNHSLTSCFTNQGYFFFHLPDALEIEACQVYFTYDPYSEEDPDEGVAGAPTGSSPQPLQPLSGEDDAYCTFPSRDDLLLFSPSLLGGPSPPSTAPGGSGAGEERMPPSLQERVPRDWDPQPLGPPTPGVPDLVDFQPPPELVLREAGEEVPDAGPREGVSFPWSRPPGQGEFRALNARLPLNTDAYLSLQELQGQDPTHLV

SEQ ID NO: 286 - DNA, 4045 bp, Homo sapiens
gcagccagagctcagcagggccctggagagatggccacggtcccagcaccggggaggactggagagcgcgcgctgccaccgccccatgtctcagccagggcttccttcctcggctccaccctgtggatgtaatggcggcccctgctctgtcctggcgtctgcccctcctcatcctcctcctgcccctggctacctcttgggcatctgcagcggtgaatggcacttcccagttcacatgcttctacaactcgagagccaacatctcctgtgtctggagccaagatggggctctgcaggacacttcctgccaagtccatgcctggccggacagacggcggtggaaccaaacctgtgagctgctccccgtgagtcaagcatcctgggcctgcaacctgatcctcggagccccagattctcagaaactgaccacagttgacatcgtcaccctgagggtgctgtgccgtgagggggtgcgatggagggtgatggccatccaggacttcaagccctttgagaaccttcgcctgatggcccccatctccctccaagttgtccacgtggagacccacagatgcaacataagctgggaaatctcccaagcctcccactactttgaaagacacctggagttcgaggcccggacgctgtccccaggccacacctgggaggaggcccccctgctgactctcaagcagaagcaggaatggatctgcctggagacgctcaccccagacacccagtatgagtttcaggtgcgggtcaagcctctgcaaggcgagttcacgacctggagcccctggagccagcccctggccttcaggacaaagcctgcagcccttgggaaggacaccattccgtggctcggccacctcctcgtgggcctcagcggggcttttggcttcatcatcttagtgtacttgctgatcaactgcaggaacaccgggccatggctgaagaaggtcctgaagtgtaacaccccagacccctcgaagttcttttcccagctgagctcagagcatggaggagacgtccagaagtggctctcttcgcccttcccctcatcgtccttcagccctggcggcctggcacctgagatctcgccactagaagtgctggagagggacaaggtgacgcagctgctcctgcagcaggacaaggtgcctgagcccgcatccttaagcagcaaccactcgctgaccagctgcttcaccaaccagggttacttcttcttccacctcccggatgccttggagatagaggcctgccaggtgtactttacttacgacccctactcagaggaagaccctgatgagggtgtggccggggcacccacagggtcttccccccaacccctgcagcctctgtcaggggaggacgacgcctactgcaccttcccctccagggatgacctgctgctcttctcccccagtctcctcggtggccccagccccccaagcactgcccctgggggcagtggggccggtgaagagaggatgcccccttctttgcaagaaagagtccccagagactgggacccccagcccctggggcctcccaccccaggagtcccagacctggtggattttcagccaccccctgagctggtgctgcgagaggctggggaggaggtccctgacgctggccccagggagggagtcagtttcccctggtccaggcctcctgggcagggggagttcagggcccttaatgctcgcctgcccctgaacactgatgcctacttgtccctccaagaactccagggtcaggacccaactcacttggtgtagacagatggccagggtgggaggcaggcagctgcctgctctgcgccgagcctcagaaggaccctgttgagggtcctcagtccactgctgaggacactcagtgtccagttgcagctggacttctccacccggatggcccccacccagtcctgcacacttggtccatccatttccaaacctccactgctgctcccgggtcctgctgcccgagccaggaactgtgtgtgttgcaggggggcagtaactccccaactccctcgttaatcacaggatcccacgaatttaggctcagaagcatcgctcctctccagccctgcagctattcaccaatatcagtcctcgcggctctccagggctccctgccctgacctcttccctgggttttctgccccagcctcctccttccctcccctccccctccacagggcagcctgagcgtgctttccaaaacccaaatatggccacgctccccctcggttcaaaaccttgcacaggtcccactgccctcagccccacttctcagcctggtacttgtacctccggtgtcgtgtggggacatccccttctgcaatcctccctaccgtcctcctgagccactcagagctccctcacaccccctctgttgcacatgctattccctggggctgctgtgcgctccccctcatctaggtgacaaacttccctgactcttcaagtgccggttttgcttctcctggagggaagcactgcctcccttaatctgccagaaacttctagcgtcagtgctggagggagaagctgtcagggacccagggcgcctggagaaagaggccctgttactattcctttgggatctctgaggcctcagagtgcttggctgctgtatctttaatgctggggcccaagtaagggcacagatccccccacaaagtggatgcctgctgcatcttcccacagtggcttcacagacccacaagagaagctgatggggagtaaaccctggagtccgaggcccaggcagcagccccgcctagtggtgggccctgatgctgccaggcctgggacctcccactgccccctccactggaggggtctcctctgcagctcagggactggcacactggcctccagaagggcagctccacagggcagggcctcattatttttcactgccccagacacagtgcccaacaccccgtcgtataccctggatgaacgaattaattacctggcaccacctcgtctgggctccctgcgcctgacattcacacagagaggcagagtcccgtgcccattaggtctggcatgccccctcctgcaaggggctcaaccccctaccccgacccctccacgtatctttcctaggcagatcacgttgcaatggctcaaacaacattccaccccagcaggacagtgaccccagtcccagctaactctgacctgggagccctcaggcacctgcacttacaggccttgctcacagctgattgggcacctgaccacacgcccccacaggctctgaccagcagcctatgagggggtttggcaccaagctctgtccaatcaggtaggctgggcctgaactagccaatcagatcaactctgtcttgggcgtttgaactcagggagggaggcccttgggagcaggtgcttgtggacaaggctccacaagcgttgagccttggaaaggtagacaagcgttgagccactaagcagaggaccttgggttcccaatacaaaaatacctactgctgagagggctgctgaccatttggtcaggattcctgttgcctttatatccaaaataaactcccctttcttgaggttgtctgagtcttgggtctatgccttgaaaaaagctgaattattggacagtctcacctcctgccatagggtcctgaatgtttcagaccacaaggggctccacacctttgctgtgtgttctggggcaacctactaatcctctctgcaagtcggtctccttatccccccaaatggaaattgtatttgccttctccactttgggaggctcccacttcttgggagggttacattttttaagtcttaatcatttgtgacatatgtatctatacatccgtatcttttaatgatccgtgtgtaccatctttgtgattatttccttaatattttttctttaagtcagttcattttcgttgaaatacatttatttaaagaaaaatctttgttactctgtaaatgaaaaaacccattttcgctataaataaaaggtaactgtacaaaataagtacaatgcaacaaaa

SEQ ID NO: 287 - protein, 549 aa, Homo sapiens; identical to SEQ ID NO: 285

SEQ ID NO: 288 - DNA, 2933 bp, Homo sapiens
ccctcctctgctgggcctgggggtctgggccagcaacaagttagtattgcagacatgggccaaggagccagaggccatgcagtggctcagggtccgtgagtcgcctggggaggccacaggacacagggtcaccatggggacagccgccctgggtcccgtctgggcagcgctcctgctctttctcctgatgtgtgagatccctatggtggagctcacctttgacagagctgtggccagcggctgccaacggtgctgtgactctgaggaccccctggatcctgcccatgtatcctcagcctcttcctccggccgcccccacgccctgcctgagatcagaccctacattaatatcaccatcctgaagggtgacaaaggggacccaggcccaatgggcctgccagggtacatgggcagggagggtccccaaggggagcctggccctcagggcagcaagggtgacaagggggagatgggcagccccggcgccccgtgccagaagcgcttcttcgccttctcagtgggccgcaagacggccctgcacagcggcgaggacttccagacgctgctcttcgaaagggtctttgtgaaccttgatgggtgctttgacatggcgaccggccagtttgctgctcccctgcgtggcatctacttcttcagcctcaatgtgcacagctggaattacaaggagacgtacgtgcacattatgcataaccagaaagaggctgtcatcctgtacgcgcagcccagcgagcgcagcatcatgcagagccagagtgtgatgctggacctggcctacggggaccgcgtctgggtgcggctcttcaagcgccagcgcgagaacgccatctacagcaacgacttcgacacctacatcaccttcagcggccacctcatcaaggccgaggacgactgagggcctctgggccaccctcccggctggagagctcaggtgctggtcccgtcccctgcagggctcagtttgcactgctgtgaagcaggaaggccagggaggtccccggggacctggcattctggggagaccctgcttctatcttggctgccatcatccctcccagcctatttctgctcctctcttctctcttggacctattttaagaagcttgctaacctaaatattctagaactttcccagcctcgtagcccagcacttctcaaacttggaaatgcatgcgaatcacccggggttcgtgttaaatgcagattctgactcagcaggtctgagtgggtccaggattctgtgtttctcacatgttcctgggtgatgctgatggggtcagtctatgaaccacactggagcaaccaggttctaggactttctcaatattctagtactttctgaacattctggaatcctccccacattctagaattctcccaacatttttttttcttgagacagagtcttgctctgttgcccaggctagagtgcagtggtgcaatctcagttcactgcaacctctgcctcccgggttcaagcgattcttctgcctcagcctccctagtggctgggattacaggcgcctgctaccatgcctggctaatttttgtatttttagtagagatggggtttcaccatattggccaggctggtcttgaactcctgacttcaggtgacccacccgcctcggcctctcaaaatgctgggattacaggtgtgagccaccgtgcctggccaattccaacattcttaaattctctcatccctccagggctccccgtgctatgttctctttaccccttccccctcttctcttgctcaggcctgcaccactgcagccaccgttcatttattcattcattaaacactgagcactcactctgtgctgggtcccgggaagggtgagggggtcagacacaggccctgcccctgccctcagtgactggccagtccagcccaggcggggagagatgtgtacataggttttaaagcagacccagagctcatgggggcctgtgttctgggtgttcaggtgctgctggtcctccattacccactgctccccaaggctggtgggacggggtcccggtggcaggggcaggtatctccttcccgttcctcatccacctgcccagtgctcatcgttacagcaaaccccagggggccttggccaggtcaagggttctgtgaggagaggacccaggagtgtgggggcatttggggggtgaagtggcccccgaagaatggaacccacacccatagctctccccacagctgatacggcatcctgcgagaagacctgccctcctcactgggatccccttcctgcctcctcccagggctctgccagggccttgctcagtcccttccaccaaagtcatctgaacttccgtttccccagggcctccagctgccctcagacactgatgtctgtccccaggtgctctctgcccctcatgcccctctcaccggcccagtgccccgactctccaggctttatcaaggtgctaaggcccgggtgggcagctcctcgtctcagagccctcctccggcctggtgctgcctttacaaacacctgcaggagaagggccacggaagccccaggctttagagccctcagcaggtctggggagctagagcaaaggagggacctcaggccttccgtttcttcttccagggtggggtggcctggtgtccccctagccttccaaacccaggtggcctgcccttctccccagagggaggcggcctccgcccattggtgctcatgcagactctggggctgaggtgccccggggggtgatctctggtgctcacagccgagggagccgtggctccatggccagatgacggaaacagggtctgaccaagtgccaggaagacctgtgctataaaccaccctgcctgatcctgcccctgcctgaccccgccacgccctgccgtccagcatgattaaagaatgctgtctcctctt

SEQ ID NO: 289 - protein, 276 aa, Homo sapiens; identical to SEQ ID NO: 283

SEQ ID NO: 290 - DNA, 43475 bp, Mus musculus
aatgatttgcagaattcctaatttgatttaaatcattttagaaagttagagtaattggtagaaagtttaaagagaccatttgttataataatgttagaattaagagcaaaatgtgctccccacacccagaagtgagggctgcataagttagaacagaagcatggtgggccttccacgcccgtagttgtacttggaagagaaaacaggcttgggagatgttaatgatcaaagaaaacattcattctaggttgagactgatttcctgaatcttgtgatctagggatgtgtctgcagggttcagtgtgcaccatagaagggcaaggctatgaataaagagtatataattctattgtgagttattataattatataccatttctatatagaatgtattaattctataattacagttctataattctgcaagaatagagaatagcagattagccagtttagctgaacaaggcttcagacattagcagtaagatggatgagaacctggatctttgtgaatacaaagtgtcaccagctaagcataggaaaaagtcgctactacagactggctcgcttgaatttgttgatcactgacaaaagaattatagtttgaggttacagtgaactcatggagagaaagactgatgagaaatgttcattcattcattcattcattcagtgcctctgtctaccaggatgcctgagaacagggatttcccagcagagagtgcaaggactccttgactctacactatgaggactctgagcactttggagtgagtccaaggctggagccagaaatctacaagatgagatgaaggtccctcacagtacctgagaggatttcaaggatgtgtagaaagagatgcagacagagctcactctgatcatgtgagatcatattggccttgtattgatcaaacctgagatgacataagcttctacataaggaattttgaaaatctccctttagaaatcatcactacaatcatcatgtgcatcttcatcacaaatgttatcatcatcgatgcaatcaccaggatcacaacagtcatcatctgcatcctcatcaccgccattatcatcgtcaatgacatcactgtcatcagcatcattatcaccaccatcctcatcaccattatcactatcgtcatcatcaccatccacactgtataaatgatacattatattgtcactccatggtgatttaagggatggtttggattgtaaatgagaaagagagtatgacagacagaaacacacaaaaaaacagacagacagacagacaggagagagagagagagagagagagagagagagagagagagagagagagagagagaacagccagaagaatctagaagagtctagagcagaaagaggggaaaaaaactgaacaaggcaagcatacttgacctggccagggttaccgtgaggcaggagagaatagcagtggatagaaactggagaaaacatggtgagagaagcagaaacgggggaggggggttcagaaaagcaagagagtgaagggggtgaggcacattgaggatagcatggtccttaggagtggagtagcttgggagagggaagatcatgagtttaagggagaggaagaaggaagaaggcctggggtgcagcatagactttgagatgtgtaacaggcactgtggtactgaaggagcctggagtccagggagccatatgtcctttctgtcagagggaagggaattgcctcctttcctgtaggaagaggggcgttggctttacaattcctgagaagtgctgctttttgtctccttactggaaatcctcctacagtccagtgtgagctcatttctggacttctggactgccttttggagttcagggaattggagtttctgttggacctgacagccaccatcatactgtccccatcatctctgtatcaatcagacttacagagggagaatgctgtggcctggcctacagtcagataaatcctgaggaaaatagactgagctaagccaggcacagaagaacagacagggcaatgagacatagacggggtccctacttggtcaaatttacagaggcaggaagtggaatgcaggtgtctgggacacacagaggagaatgacatgtactggcctgttcaggtgagggggcgggaatgctcaggagatgtgcagtagtgacagtcacctaagtgtacataggcagtgactgtgctcatgtaaggaccaagagcattaatttttgtatgttttatcatagtcttttcagaagcaggcatagttggtatacagtaaggcacctgagcaatggccaccaacagtcacccattactgagagagcaactaggcagggacccaaatgccaccttggattaggatgttgtacatgacctgatggtagatatctaggggtgtaggtttataagtatatgccatgcacgtgagatataaaaactgatagagtgtaataaatttaaagttctttaatgtaaatacagcatagaattctcttctgttctgtggaaaaaactgaagtccccatcagtgaggagtcaacttccatgacattcaaagcaagatcccaagactaagatggatccatgtctttcccatctgtttgtcagaccactcctcatgtgacatctgccagtggccaaagtgggacctcacagccctatctgaggtgagtcagagatgcttaacactctaacggtgcatggttgtgactaagcaatgttggttgtcttagaaatgtaacttactatgccttctgtgcctgtccttaaatgagagttgacagacaactctccttgtgccccttaggttcaaggcagcacccaaaatgacagtgctggtgacagtgtcccaaacagaggggctttggctgggtaatccgaaagtatgctactggataaacaagtctaaagacagatttctatttactggaaaagcagccatctcaaggaggtttctttttatgagaaacttcccttaatcagccccaacagtcaaccactttaggcaaagatatctatttctgggttaatctgtccagccagctgtctcagctcaaggaccctaccctgttgacacataaaatctgtttgctccacaccaccccaaattgcttctccctctgccttcttagagatagtcttggcaattcaatcctggataaacctatccttctgcccatgagtctagtctagtccagtggtcacactgtgcttggctgctttgatcaggagctggatgccaagtggcccctccttcaacagtccctgcaggcagtcatgacagctgtgtgctcatggctcattttcctgtcacctttactggatttagaatcatcatggagagcatgtgaaggcatttctagattagactgactgacatggggagacccgtgtcaatgtgcatggcactatacctttggctagggtatctgactacataagaaggagaaagctggctgagccccagaggttgaggctctctgctccctgactgcagactgcctcacattccagttgacatggcttcccatcatgatgtaagtcaagtaatccattttctgccttttggtgtgtttaaaagcacagggggtcagagagtgtttaaaacacaaaaggggtcattaatccttgctggattaaacagtctgttactaccagaaggaaacacttcaatcagaaagcaagcagggctgctggggaagccatgactgctgccccgggaggccctgctccaggcctggcagcttcaggatactctcattaacttttgcatattccatgtggagacagggatggattctgagttcaagcctgctggttttcaagtctcaaagcaataagcagcccacctgaaaacacacaagactctgtgaagttcctcgttctcagggctcagagatgtgagtctctagtttaggaaggcttagagcttgttcaaactgcagcctagagctgtagccattctgcctttaaatgcctggagccacagtctcctttttgtcaaaacctagagctacaagcccagcctgtaagccacttgtattcagagctcaggactgcaaaggctaaggaggctgagccttgcccacttgtagtgtttacctgaatagaaaaaatcttcattggtacacatagaaggtccctgtgagaccagaaggaaggttttccaggttcatctgcttatctgttctggcttcatggttttatatcatcgacaattctatatcttcagggggatgattttccagttccaatatttcactttcatgtcacttcctaggtgtggactggatgtccccacaggaaggcctgagtttgagacacatctttccttgcccaagaaaagggggtcccagttgtaaggagctcagctgagctcccaacagttgtagtgtctaagggaaatggaaaggacaaaggcattcttctgcaacacttgctgggttcaaaaaagcaggagcccggcccagaggacgcagccattgctctactgtttcccctgaggaaggtagacagagggtcagatgggtcagcacatacatgaccctctctattgttgagagaacccagaacaaaagttctggcagtctggggaggctctggaaaggactgggaaggcatggggtgaaggttacaactggaaagaggatatgtgttgtcaaggactttctctttctccttggggacctcacctgaggtgcaccattaaagaccgcagcccaagttgtcagagagggatccaggcataggacagttggccaggaacacaaagatgtagagaaccaagacagtctggtgtacccagtccttgatgtcagtgcccctcagaaacttaaggttagaccttgagtggaagtcagtcttcctgcatacacctaccaggcaaactttggaaagaatcctaggcttaggaactgcatagattttgaccataacccagctccttactaaggtgagtcccttggtgggcagtgtggttaggcttttcctggggcagaaattgaagcttcaaactctctggtcacagaaatccttgccaggcagaaagatctgtactgtgcaggtctcttaagcaggaaacccacagaggagccaagctgacagtgcacactcctcgctgaagctcttctccaccgggccacctagtggccagcccttgattgcagccccttcctgaagtcacagcccctcccaggacaagaggggaagttcagggaagcaggcccagaaagacattcttcaagcctgccctgtccagcccaaggcaatcccctcctgaccttgccacagcagaaagagacatcaccttgggatttagcacccgagagaaatcggggtcagaagcttctctccagcaaatccagccagggacttccctgtcagggtggagcattgcaagctctgcctggacagctgtggtcttccttgcagggggagaagaagggggtgaaaagagggggagagagagagagaaagagagaggggaggggaggggaggggaagggaacggaggagagggacagagacacacagagagacagagacacaagataagaacaacaaaaagaccctaccaggctaggcttggcttccccagctgtcatggatccaatgtctcctgactgctgtgctctccctctgccttactaaacaatcagaaaataaaaactttggccttcctttggagagctcttttcccagggatgttccagagagcagattcccatctctccctgttaactgctcagcatgctgctgcagaggctctgctgtggtgtgtgagaagttcccaacctggtggatgtgacagagactcggaggtctcaagtataagatctcccatgggtgctccctcggagggctttaaagtgagcatgtttgacaattagattattccaggatggagagcagtggccctctgtcaactgcatgaaaggcaatgtggaacatcccaggagcaaacattgggtcaacagctgttcactgacaaatgtctctacaaagaagcacgccatcgtgcctgtctctgcacagcgttaagagacaccctccacatcattgtgacagaattcttaactgtcagaggatgagttggtatcttgtttaagggacttccttcttgattttttggttgctcattggccaagtccatagggccaggtctgaatgacagcccaggctgcctccagctgtcacagaacagtttgggcatagctatcttttgtcacccaccacaccaccaaattcactgaaagtgaggagcagagcaggtttggaaaagcctgggatggagagatctgggatgctctcctcctccaaaacaagctgtgtgagttgcggctttgttttgttttgttttgtttttccatttacaatgttcataaatgtggcgacttaattggcaaagatgaaaacgtcatcggtgtctataccgttgttgagtacagggaattgattctacactagtccataactagctggtgcttgagttgtatcaagggacagtgaagttagaggtccaaactcggagcttgggtcttaggaaagccagacttgccaaccaactgtggactatatcactctataacagtgtgttggccagcccaggaatcctgttagtgagacacgtttgtcacatacctaggactgccaggagcatcaaagccactgggagctttgattgatccacaggcatctgtcctgccccatgtgagcacagtgctgtgtgtggtacctgtgtcctgggtgtgtttagacctgtgacagctggaataagcttgatcctggcagcaagcgctgagctgcagcaaacatgctttcctcagaatagaaggagcatcatgcctgccctttgccctcaatggtaagctttgttccttcctgccattaagacttgaaaagctgtgtcctagacactgaggggtaagagctaaggaagggctgtatgcctgattctgaagagtcatgaatgagcatatcggtgtatgtgacttattgtgaatttattcatggtgggacaagtaccgtggtcaaagcaacataggtgaggaaaagacctatttcaggtcacagcccaccatggaggggaagtcggggcaggaactcaagcagaagtgtgagccatgaaccgtggcaggacactgtgtgctggctggttcgtaggttcatgcttatgtaactatcttatacagctcaagatcacatacctagggaatggtaccgcccacagtaggcggggccctcctacatcaataagcaatcaagacaacttctgtggttgctcatgccttttggaggcacaggcaagctgatctctgtgagtttgaggccatccagggctgcatagggagatgctatctcaagccaagaaacagtcaagacaaccccatctgatctggacaagtcctcacttgagactgctttcttaggagactctaggctggtcgagttgctagttaagctgactaagacgtgagggaatatatggaaacatatttaaaacttcacttgtataaattatggtagagttaatatgtatatctattgctttgagacaggtactgtttccaaggctctaatttccaaagcataggatacactgcataaatatgccagggacttccagtttaaaaggtgacctgtaaacatttggatagcttagtcatatcttaccaatgttgttctgtgggaagtccttcttaatggccttttgggctgctaactagctgtgttcattttcactttgagttgagatctgaaatcgagtgagaatggctcccttggggcaagggcacatttatctggggacagtctgtgttaagaaagcaatgggtattatataaagtaagtagcaggaggttggtgacaaggaccctattgagccctagtgtgacactgatcccaaagagtagtaggttgtccaacaagacatgttgttcctgctgtatgatctgaggatcaaggatttcttgtcagttttacatgtccggggtgtcccgtgtaggtggggatggtggacatgaccatttatgcattgatttcaagggctgtctgggtgatgtgtcaatttcctcaaacagtaagatatttggagaaatggttatgcaatgtgtgaggagatactaatctctctgaatttcaaggccacataggagggtggatccagttatcagacagagaccacctgccttgtgttagtatcccctgttccatgagagcctctcataggtaccacacaattcatactctgtgtcgtttgctgccatgactatggcatagctactgcacggggagaaagggttgactaagtacctaatgaacaccattgtgaaccaaaacacctgccgtgtgccccatggattgcacccctcgcgacaagtcagccaccgaacttcttgactttcgttttctgttgaataaaagaaaatatgaagtaaaacaaacccattggtgtctggacatgaggatctgcagtgttgtggattagaggtatacgattcgggcacactgatctctgagaatagaatcagtccagaggttggtggaaggtttctgttcatctggaactaactgctgtccccctgcccaggggccctctcctactgtctggtctcctatctctgtagctctgtattgggagataagaaattaccagtgtatcactgaagctacttttaaaaaaaatctgacatttcaatgcttgtatttttatgcttatttgaatttatttactatattaaaatatcactcatttctatgaaagggttttggtgtccctttaaattttgccctgagagaatggctcactcccctcctctttttttttttttccattttttattaggtatttcgctcatttacatttgcaatgctataccaaaagtcccccatagccacccaccccctctcccctacccacccactccccttttatggccctggcgttcccctgtactggggcatataaagtttgcgtgtccaatgggcctctctttcaagtgatggccgactaggccatcttttgatgcatatgcagctagagtcaagagctccggggtactggttagttcataatgttgttccacctatagggttgcagatccctttagcttctttggtactttctctagctccttcattgggggccatgtgatccatccaatagccgactgtgagcatccacttctatgtttgctaggcccaggcatactctgacaagagacagctatatcagggtcctttcagcataatcttgctagtgtatgcaatggtgtcagcatttggaagctgattatgggatggatccccggatatgctagtgtctacatggtccatccttttatctcagctccaaactttgtctctgtaactccttccaagggtgttttattcccacttctaaggaggggcatagtggtcacacttcagtcttcatttttcttgtcactcccctcctcttaaccccagcagcctcaagttattcatttgttcattcattcattcattcattcattcactttatacccagtcatgtgttcctcctctgggccatggctgggcactgggggaggggaacagacacaaaacatcacttgctctgaagacaagatgggaagaaaacagggactctagggcaggacagaaaagggaaagccaaagctgacagccagggatcaagactgctcccactgcctactgactgttgtcaacttaggttttccatgtcaatggcataccctcaaaacctttctggtttgtaggtccttctagaaaaataccccaaggtgtctcaagacttgaagaggccacctgtagctgatttgcataaggccacatgctaagaagtggtgccctcaaggtcctccccagctctgcctggctctgggcacatgcttgcagggaggtggttattgccctctgtgtctgcttcctccagaggagtcagggaggggtgtggaggagaccatttcaggctgagacctgaagggcacatgagagctgactgggagatggtggggagcgagctactctggcagaactaaatgtcgtgagtattatcagaggctaatgtccacaattctgagaatcaggcgaagctgcttgcgaaagggcactggcaacttcctcaatctgctctctgtttcctccagatggggcacagataaataggaagagcctgcaactcactggcacttggaggctcccgaaggaggctgcctgtcgcccaagcacagaggtaagtggctggcttcctgatgcagagctgagggtgggcgcaaagcaggggctgtgggggtctccagggtggaaaaggacaggataagacagggctggggtagcgtattcctcagacttgatctctctagaaagactaggtctcagactccaagtcagtgagtggaggaggggcaccccggagcattggagctgggaacaaagttagaactctggaagaggtacggttaggatacgctctggggctgtgggactccgggaggacacagctttatcactggaggtctggtggcagggaggactcccctaaagctctatatcgggctaagcactgtgttccttctaactttgccatccatatgttacttaattccctgtcctgagcttcaggtcacacatctgtgggacagggtgagtgggagacatggcttcctctgtttcaactagaaatggaggacagagagaggagaaagagagggggtagagaaaatttacctacaaggatgacgaagtgttggggacagaaccagagatgtagaacctcccttggtactgggtgtaatttgacaatcttacttgggaagtgcccagagatataccagatcatccagctctgtttttctctttctctgtctctgtctctgtctctgtctctgtctctgtctctgtctctgtctctctgactatctctttctctctatgtgtgtgtgtctggtttctgtctctccaactctgtctctctctctttctttgtctctctctgtcacaaacacacacacacgcacacgcacacgcacacgcgcacacgcacacacacacacacacacaccatactgtgctctgaaatcaccacagatgatttgggtccagatgtgtcgcttctgtacctagtgtgccggaaggtaggtgtctcatcacatagctagggaccagtcgctctcagacagggacacagacagcccctctgctgacagagaccactgtcatgtctcacagatcataaactaacctgtccatatatcccacatgctgtattccagaggtcatgcatatgtgcgacagaaatctctgtgatctgttaagcaaagaatttgcctgaggttcaggcccctgcctctgctcacgcccagcacatagggcctttgaacctgatctggcaatggaaggaaaaggcacctccactcacttctttgtagtgcagcgtctcccctttctctacctctttttcaaaagcccttattttttttaatttatttattttattatatgtaagtacactgtagctgttttcagacactccagaagagtgagtcagatctcattacaaatggttgttagccaccatatggttgtgagatttgaactcaagaccttcacaaaagcagtcagtgttcttaactgctgagccatcttgccagccctcttgaaaagctttaaaagaaaactccttctctgtcagcatgtgttgaaatgccacttcagactgtatcccgccattggctctaacaaacctttagctggaacctaatgtctgtactggaaccagaaggctgtcaatgaggttgtcctataaggctccccttcacttgctctgctgtctctgacccctagacctctctcttcccctggtgagaagtcttctaggatctcctgtctgtctataccagaaatcatagtaagccacttgttgcatgggcctgggactgtcccttcacccagacctgctgagtacacagatacctgttcgccatcttgcttcactacttctggtctggccacacttcaggaagggacctgagtgccacagggtgcttgtctcccttgctgccagtcctctagacaatggttctcaacctgtgggtcgggaccccttggcagtctcctgtcagatgtctagcagatcagatatttacatcacgactcagaaccacatgaaaatattgaagtagcaatgaaataatgttaaggttgtgggtcaccacaacataaggatctgttttaaggggtcacagcattaggaaggttgggagccactggtctagaccctcttgaccagggttcatgatggcattgctcagttccacgtgtctaaggcctctcctcagctgctttctgtgtgacctctaatgacctctatatgacctctacacactttgtcatgaacttttctctagcaattcctcaaatcctgagcctctttagcagcactgactacaaagcaagtagcccggaaaaacagcttcttcgatgtaaacattcctagattatgtcacaccattcaaagcaggtgacctgagaccccttacacttgggcatccttcatcttccatagctgtcccttctgtcaacataggaccccattccaaattataaaaggatccatccattctcagggcacccttccttttcctggaagaagttgcccactgtgcctctgtccatagcacctgctcttactgaaattctcacaaatttgatctggtcaattctttctctaccaggccttgagctattctcaccataagagagaattacagggtgagtgcctgggtgtagtcaggtacatgctgctggagtgtatgcatggatgtgtgtctcacatatgcatgtgtgtgcatgtgcttgtgtgtgtgtgcgtgcacatgtacctgcatgtgcctgtggctctttctgcacccgggattggcttgtaccctcaccatacaagcttctaggcctggctatgggttttccctcctcagaggccctgccagaacatacttgcatattcacattctagcttaattaattcctatctggtttctttgtagtttcagagtgaataaacctttgtgctcactcctggtagctccccccccccacaaccccactcaacagttttgcttttattgtgtgaagttattcataacccaggactgtaggaaaggtcatgagttcattagcgtttaatgtcaaagaaagacacaaaagacacagacacctgactttttagtggttagaaaaaccagaatcatggatgtggcaaactcatttctgtgactaggaatatgttcagaaatcgtggctttttaacttacccagtccaacctgggcaagaaacagagcatcatcctctgctgaatttgaaaggttctggatcgaggaaattctacctcatctgagcttatttttgagatctttcagaataggaggagcccagaaacctggccttatcactcactgcttggagttgaggaaggtttataagcaactactgcttacactgtgctgtgtgtacacaccacaaagaaaaaaaactaagaacccagagtagccctccggcaactaaagtcaccgagtcagttctgaagagtgattgttagagatgtccccagaagaatatagttattttttctacacttgtgaatatatgcaagtgggtgttggtctgtagctcccagacaaggtgccaagtacacttcatttcattgacaatgcttgcctcttagccagcacctcacccactgcagcagtccttccatgtgtgagacacgttgttgctccccgccgagtgggcccatggctctggcagagcccctggctcatcactgatgtctcccctcctttcctttgctctcctccagctgaggaaagtgttcctcttggtgtcacctttcccttccagggcttctgagacccagacaggctgccttcctttcttcctttctttctttctttctttctctctctctctctttctctctctctctttctctctctctctctctctctctctctttctttttttttgagggggggttgtttgtttggttgtttggttgttttgttttgttttgctttgttttttcaagacagggtttctctgccctggctgtcctggaactcactctgtataccaggctggcctcgaactcagatatccacctgcctctgcctcccaagtgctgggattaccatctggccaggctgcctttctccaggtccctgagcatctgtcagtctcactgactccacaaacccctccccgctttggccatgcacatctcagaagtttcccgccacgcctttctcatggctatctaatctctttctgtcctggcttggtcacatgctccccctgagcccttttcacttcccctgcacaccagagcagcttccatctctggtcaccaataccgcagcatctctggctccagtcagatcccagaggtgtctttaaaatatcagttgggattgtccagtggtcccagtgcaaaagcacctgaaagtgacagccgcctaaagtcctagtgagcaggatgaggtttccctcctgctacttcatcatctttacccacatgattgttagccaagctagtattccatgcattcagacttagttacatgtgatggaatatatatccctgggttacgtttttctctgtcaagtttacgatggcttctgtcatagaaagtatttccatcatctgctgtttccatcatctgttctgtttgcttacgtgtgtgatcatggatgtgtgggtacatttgtgtgtaagtgcatgtggaggccagaggacactctcaggtgtccttccttaggtacagaatatcttcttcttgagacagggtttctcatgggcctgaaactcagtaagtagactaggctggcctggaactcagtaagtagcctaggctggcccaccaggaagcccctgggatctgcctttctctctgcctcctagtgcttggatcagaagtgtaggccaccatacttgacctttttccagtggcctctgggcctctgactcaggtccacatgcttgctaacaaggttgttacgcactaagcgacctcgtcagccctgtctgttggtttgacttttgttttgctttgtggtttctggcttcaatgttttactcaacccctaaaattaaagacatagtttaatggtcttaatggcttagttttgagtttcagatctttaattcaccttggatgtggatgtaaagaaacaagttcacttgaaagcacggttccctcattgattagaagccaccagtcacgagtgtgcagcccctctgtgcctcagtggctggagacagtagtctagctttctaagctctggcacacttggttagattcacccctgctttgatctttgctctgactatgggtgtttagtagcagatgctcatgcctttctgctctgtattttggactcagagtcagctcagtcaggcactcacatccttctctattctttgttactatctctctaagcctcaggagtcctctcagcacactgatccctggagacagagctgggtctctctcctttgctagcattggccgggggctggggcagcccaagtcctctctggctctgacattggcatggggatcagggggacaaactcaggtcatcagaacagtttgcacactgaacattcccatggccctggcaagtaagttggccctgtagcctcttgctatggatgcactgtgggtggacgtttgagcttctctccttccctggtgaagtgctccaaacatggccaccatgcacacttctttaacaaatctggatctgactggtttgtgaaatggttctgtctgccctcccctcaatcatatttcttcatacactcagggatcagggtgtgcaaacacttctggtttcctgcacttctccctctctgccacctccaccctgcccctttttttcctaggtcctcatctctctatacttatccttcgtcttcaaaggctatcaagcctaacttgtttttttttttcagactggtgctcactgtgttgcccaggctagccccacattcctagtctggaataatccttccttactagcagctggaattgtatgccccccaaggacctgactcagtccttaaggtcaatgctccctcctacttatattctacaccagcacttgggtttaattagcatttttgaaccctcataaagccaggcatgtctcagcccattttcagttctcctcttaccccgccgccccccccccatcctcctccaccacctcagagccacctcccaccttagtcatctgaggttttgcctggttcttgcccctgctgtgtgctgcctcactgttgcttcctgcagtgcaaatctcccctacatctctgcaaggcatgctgctttctctgttcccatactgcacgctgtcttgctttaaacctgtctttcctgaaaaacatgatagaataacttcttttcaggaaccatctggacatttcttctctgccttcgtgcaaccaaaccagacattgggctggggtggttacctcagagggacatgaggctttgcatgtggcttccgtcctttccttgtgatccaaaatggtgactggagtgccaaccgtcctttctgagatataggaaagaaaagaaaaaagtgaagacaaacggaccttttaccatgccttttaagtagtctttcggaaagatacgtacagggcttccctcatggctccttggacagcatttaatcaagtgaccctgcctagtggcaggagagagtaaaaggtattattacttttattcttgtgaaaaataatccccaaaaggcaagggacagtgagggaagctgccactgctggccatgcatatccctgatcctcagcttgttcccctttccagtgcttccacggtgttctggagagtgtcccctgccttgtccttatccccatttttgcacatccccctcagttgggttcttctctgtggtgtctattctgtggtgtcactcatcattgcactgatctttctaaaatcccgagtctcctatcttaggacttcttgttttttgtttttgcttttgtttttacaacagcagtctgtgtttaaatagctttaggctctgcagtaactaagggatacaagctcagagattcaacttttctcgccttgggctctgtctggtcaatataagtatggcagagcagtctgagttggggcagacataggacaccaacgatcaggaaacacaacctctcagggaagcatggtgagagagggcgggtcctcagccaacccacctgggctctgtcccagcctgcctcacacagctgtggcactgtggcccatcactccacatccctataccgtttcctgtctgcaaggattctcacagctgccttgatcaagatgcattgatttccccaaagcgctttgcacactggttgatggtgggcattaaacctcaggcgcctgctcatggattctctgtgtgtatttaaatactctgctgtaggtgtttgatgacacagctctgttgtcttttacagtagataataacttattctccatgatttcaattgttagggactgaatactcgtgcaccccaaaacccttatgtggaaactactttcccagggggaggatacaggagactggtgtccttctattagacatcccaggacgctcccttgatgcctccactgtggcagtagcagccagaaaagcctatgaggaagaggtctcatctgacctcaaacctgcatgtgccttgaccttggccttgccactttccagaaactcaagaaataaatgtctgtggtttctatgaactatgggtggtcttttgtgacagcctcctcccaatgaagacattggtcattgatacatctgttttgttccccccttacttggtgactctgttggctttatgaaaggcaggcagttggctgcaaaccctttcatccctctttgtcacagaatcttttggttacttgtaaggttgacagctcaagggcaccagcagcaaaggtttgatgtgatttagcatgggactttttaattaacctcacatatagggaggcttgtgagacagaggtttgggatttgtgtgtgttgttattcaatcatcttagcattttccaatggaacattccatcattttatgctctttcctggttcctccttcattcatattgagcattatggaggtaaaatgacactcgttgcagtcaaggggtccaaagagtagagatgtatatggctgataggtaagagatagataaagataaaaacatagatagatgatagatagatagatagatagatagatagatagatagatgatagatagatagatagttgatacatgatagagagacaatagataaaagatagatgataggtagataaattatagacataatgatagatgattgaaagatagatgatagatggataatagataaatagatgaatagatagacagacagacagacagatagttgatacacgaataaataggcacgtgatgcaggcacatggatggttgcaagaatagatgtgcacatacagagatgaataatacataggtacatggatgaactgataaatggatgatagaaggacagatgggtgtaggctgtgtgcatcttgactcaagtttcaaatgccggtaggagaaggggtcacagcaatggctctgcaactctggtacttcccaagagaactcaatgaaaacaaggaaatccccagacttcagagaaaggggaactgggaagcagaggggcctgtgggagacctgatggtaaactaagcagaggcagggagagcaccaggctctgcctgtgctggagaacatagctgggtaggtgtgtgcagacagaaacaagagagcaatcacacctaggcttgccccgaccccacggccacatccatcaaaggtgtgggtctcagctcctctatgtggcctggtgcaagcttaacagcagcttcactctcacctctccacactgcagtgtggtctgaggaaggatctgctgcctcagaggccatcaatccatctcttctatgttcctgctttagcacaatgaggcttaagagaagggaacagctctagggcagcatgcatcagggcctcttctctgggttcaggtcacttggcatcgcagggtactggacagctctcagccttacgcatctttttacagccacaaaggatgcagtctaggagggaagaatcacaagccctgtaagatgagtggagccaaacccccagccaagcaccaatacagaaccccgggacaatgaggacacccccctgcccatagcttccagtgcagccaccaaaagtgccaaaatggaccagcaaatggcactcacatgggggctgtgctacatggcactggtggctctctgttggggacacggggtgacagaggcagaaggtaagtctgaagacacctgccctttatctccctttttagtgttgagcctggtgggatctgaacccaccataagcccagcagcccccagaaaccctgcagctccacccactgtatccagctctggtttttcctgtctctcctacattctttctctccttgagggtgcccctggcccctctcttccctgttcttcatattcctggtcctccttgtctggctctggagcatccagctcaatggtgtccctctccagccatattactcaatgcatcccctaaaacctcaacctccaaggagccagcatcttctctgcctctcccccacacccccattcctttaaggactgccaggacgcctaattcttggtcttgggagcttcagcctaaagacctgtccccaaaatatctctagccttctcctctatccagaggccctatgggatgccctgttcccagtgccccatggatttcctccatgacaaggtaggagccactttctctttcgaatcccagctttagagagatgcaaaggcttagcagatcaggaccctagaaagggatatactagctacttctcaggcactgctgtgtccgtaatggccaagtgacacctcagagaacagggtcaggcctgagcaatgccctacatgagggcaggtgcagcacagaacatatatcatggctgagaatccactgggatctcatgttcctgacagaaaaggaacgtcctcaacaggatccaccacacagccacaccaggctcaggccctctacctggtcacctgggcctgagcaggaagccagagaccagggctttgtgtgcatgtctttaatgggagccctcaggaaacagaggcaggaggatctctgtgagtttgtcgctatatggttttcaaaggaagtttcagacagcctgggttacatagaaagaccctgtctcaaaacaaacaaatgaaaaaaacactcctgtgggacaggagtgagggggatggggacacctggacacctggaggggagaggctggctctcctgatcctctgcttctccttgccagaaacggtccctctgaagactctgcagtgctacaatgactacaccaaccacatcatctgcagctgggcggacacagaggatgcccaggggctaatcaacatgaccctctatcaccagctagagaagtgagtgccactgagcccattggtattgctagccaccaccacctctctccccaccactgtgttgtcagtgattgtggccatcatccccggtcacctgacctgtgggctacccggccatcccaacacctgcagcttctgcagctctagacctgtccagccctgagcatcctgtctctctcctccactcctcatcaacctggcccgaggagctgctgatctcatagtccccctgtctctcctgtattcctggcctgaacacactcccccaggatttgactatctccaaggaaaccaaactgcccctgccactgagaaatacccatagccaaatggccagggccgaaccatgttctcccaacccacccaagatgacctcctgtagcttacctttactactgtcatggtcccctgatgtctctgacacctctttctgctctatttgcttcccttttctctcctgtctactgtagagtgtgagatctgtaaatgaagccctggcttcctatctacatgcagtcatttggggggggggggctcatgggcagagactctctggggagaatggccaactttagcacagacatccctgcctagcacacaagcatctctctatgcttttatttgagtaatccatttctctgactccaaatgccacaaactggtttccactcttgctccagggattgtcctgcttctgctgtctccacatctcactttattagctgggaagagatgacagcttgactaaatgactgtggaggctggttttaaaagtctcctacctccttttcttctccttatttaacactactaagtttatcccccaatgaaatacacgtctgaccaacttggaaaccaccaccagcatccaatctacttagtatgaccaggatggaactatcttgctagttcatcatcctaaccaatcaatccctgcaccaaaacacgcccctcactttattaccctcaatccctgcctgcttgctactaacaaacacatgaaacctactttccttgccagcagacccatgactgttttgcttacagcaggaaagccagtactgagggacaagtcattagggccacggataggacagactgacaagcatacaaactaaagaagatgccagcgagggagttgcccaagagcaccctgcactgacgtcacaagtgtaggaattcagtggggacttggagagagggtccttttggtctcagggctttgaggcagttaccaagtgatcctaaggttcagagtgatctgggacacagtgctacggttatatgaaggtcactggccgtcctaggtgctggacatctacagagaaattactagtctgcaagctttgtgagcttgtctcttcagtttcttttctaaggaatagtaaccttgatacaggcgaagatacagaagaggggaggagagcagacaaacttcccctagagaatgaccttgacctggttatctgaccttgatcagaggtggtgtgcacatgaaagctcacccagaagaccaagaataacacactgctcaacagcatggctgccaaaattagtgatgtttaaagtcaactagaagtctctgaagctaaggacgtcttaggctccacctggatgcagtcagatttcttgtgatgtgctgtaagcaagctctttaactagataggtgctagactgtacatgcgccagtctatgcttccagttacaggcctggtggcagcttcagggactttgtacttgctgcagtcagcctgctgcagaaattgcctgctttccctgcaagtcctcggagattctggtcaaactgtgcatgcagtgagtctatccgtactccccacagacccttccagattcctcagccttgtctgttgtattcaacaatttccaatgacaacatactactttgtgatccagtgtgtgcctgttccttccatcaggatgctcactgcatgtgtgtgtgtgtgtgtgtgtgtgtgtgtgtgtgtgtgtctgtgttgtgtgtataagtgtatatcttttttatatgtatatgtgtttgtatatgtgtgtataggtgagtgtctctgtctatacatgtgtatatctctttatatatgtgtgtgtgtatgtctgtgtgcatgtgtgtgtgtctgtttctgtgactctctgtgtgcttgtatatatgctgtgtgtgtctctgtgctcatgtgagtctcagtctctgtatttctgcatgtttctttgtatgtatatgcatgagtgtttgtgtgtgtgtgtgtgttgctcattgccagacactgcccttggataaaagcagggacatagtagaaactaatgaatgctccctaacagaaaacagccagtgtcctgtgagctcagtgaggaactcatgtggtcagagtgcccgtcatcccaccgctgtgtgcccagaagatgtgtcatcccctatacacgattttccatcacaaacgaagactactactccttccggccagatagtgatctgggcatccagctcatggtgccacttgcccagaatggtgaggagcggaggtcctgcctaggcagtgggtgcaagagtgggcaggatactgggatgggctagagtgaggttctcccagaattagggaccatgtcttggggttggaagagatgtgatgtggggactctgcccaaggatgatcctgttccagctgcttctgccacctatcaagccacaaagcttcctccacaggaagagctgtgcctgtgcctcctataggactttccaggtgacagaactctgctctctcttgctttcgcccatggctgcaacaccttgccctattgcagaggtcctctgatttttgtggagcagagatgaccacaataggtcacattgtcaggctctttccatgcttctgacccagagccagggtctgcgccaccctctctggaccaccgagtgtgcaggcagcaggcccacaaggcccattgtcacagcatgaccttaagtggggccaaaaatcatctgtgtggttctcttggggactgtagccgacatgtcacccacactgcagaataatgggaaaaccatggcttgtattgttcttctaagccccagcttagatgtcagactctcaggggaacactgtgagtcctctttgcccgccaacaatgttagattgaatgctctcatcacatcattgctgctggtgtctgaaagagtccctgcccctggggctcagaggtgcagactgaagggttaggcatcagctgccacatccagggatggaaagcaaagggctctggcaatcaggaagggcttcccagaaggaaggaaggagctctgcagccaagtccttgctctgggaggatcacagagccagaagcaattcttagccaggaaaccacgtgtgcaaagggggcttgcagggggagatctgagggagtggggcatgctgggtacaccaggcatgtgcactgtgttccaggaagcatcgagttccaaaggctagacaatggcagggaaatcatgggatacagacagctgcatctctagccttgaactagggaagggggggacagggaaaagaaacccttagcctgatgtgacaagacagacatggggttacaatgagctgcagtgggacaagaagaaggataaaggcttctgtctgggaactggagtccaagaaagtcatcagggcggtcctacacttatgcagggcaaggacagtcagtgataggcacttgaactgtgaggaggctgtgtggcaggagaagaggctccctggctcacagcaccgtctgctggtcagaaagcatcagtgcacagcagggcaggaggaggccccactgaggagaatgtagggcagaattactgtcaaatctgcagtttgcaggtttcaggcctgaagctgaatggtgtgagccaaagtggcacccagatcaccaggccacccgcagctccctcggtgtgcaacccgattaaccctctgcttccctctctatagtgcagccaccacttcccaagaacgtcagcatcagctcctctgaggatcgtttcctgctggagtggagtgtgtcccttggggatgcccaggtctcctggctttcatcaaaggacatagagtttgaggtggcttataagcggcttcaggactcctgggaggtaggaccctgagccgtctgtgtccacccttgggtgatggcatgtcaggttcctccttcagctcccatatctccacaggatgcctacagtctccacactagcaaatttcaggtgaatttcgagccaaagctattcctacccaacagcatctatgctgcccgtgtgcgcactcggctgtccccgggttcaagcttgtctgggagacccagcagatggagcccagaggttcactgggactcccagccaggtaatggagctgggaggacatgccccttttaggagactagaagtggggacagtctaggtccgagtaaggctccaggatctgccctacctcgacattggagcctcccaccagccctgtgtcccccgtagtctctctgggccactctgtgtcacacactcttggctctctggcagcaaacatgttctgttaatgacctcaatagcagcagcagaggcccatgtgtttacaagcgctgggctgtgtgtagggtcacctgagtccctgagttcattcaaacactcaatatttagagctggttcctccctcacgatggcgcagacgtgctggactcttccctagctggggacacacagcaggcaggctcagagcacagtgggctgatggtcacagccaggtctgctgccctcaaggatctcctctgtgtgattaacctcgtgccccaaccattgagggagggtggactgactgaatgagggtatgttgccacaggggacaaggcccagccacagaaccttcaatgcttctttgatgggatccagtccctccactgctcctgggaggtgtggacccagacgactggctctgtttcctttgggctcttctatcgccccagccctgtagctccgtgagtgtcccctgtccatcttgccttgtttcttcttatccccaggaccatacctctttgaggtcttagatggatctgacattcccccaaccctgctctcagctcaacttatttccctagggaggagaaatgctctccggtggtgaaggagccgccgggggccagtgtctacacccgctaccattgcagtctacctgtgcctgagcccagtgcacacagccagtacacagtctctgttaagcacctggaacaagggaagttcatcatgagctataaccacagtgagtgtgcctgcctctgtctgagttcccagtactataggggtccattgagttatgccaataaatacaagagcctcttaggcatctttgcttttgccactttcaaagaattgcagatttttcactcaaagtgataaaaataactatttttggattaggtgtatgtcccaatgggtgaaagccattgatgaactggcttgaggacgtgagttcaaattccagcacccacataaaaaaaaattgagcgtgatcatatccaactgtcaagagacagggggatagttggggctttctcgatactcaccagatctgggttcagtgcaagatcctgtcttaagaacacagaaagaagacaaaagccatccttctctggcttctgcatgcctgtgtttagaccctgtcttagggttttactgctgtgaacagacatcatgaccaaggcaaatcttataaaaacaacatttaattggggatggcttatagattcagagcttcagtccattatcatcaaggtgggagcatggcagcatccaggctggcatggttcaggcaaaacctagagttccacagattcatctaaaggctgctagcagaacactgagttccaggcggctaggatgaggttcttaaagcccacacctagagtgacacacctaccccagcaaggccacacctaatagtgcttctccctagtgcaagcatatacaaaccatcacagtctcccatacccccatggaggcatatgcaacagagtgagagatagagacagagagatggaaagagacattgaaagaaagtttattctaatatgtttctactgtcttcaaggacagggaagctacaggcaagccctcctgcagactatactgtctgccctcaagagtctcacctgggacctgctctccttcccctctgcttccacccaggttcatgcctgccccttccctggaccactgtccttctatacctgtcttttgcctctgagatttccggctcctcctccagctaatgttcacatttctcccatttggctctctgttttactttcctgcctggaaggagtagatgcccacagatgtcgtccttacagacctatgtcccaccttcctgtcacagggcaaggactctgacacaagggagactttccagccaaccagtaatgtttgtcctctttggtagccaatctttttgtcacctgaattcatatccagcattttcttcctgggagccttgctccaggaaaaggaggtcctctgattcaagggactcctccatgttttagagccatctgaattatttttgtgaaagccctctaatgtcacaagctatgactcttttgggttttttgttttgttttgttttttttattttgttttttttttattagatatttatttcatttgactcttttgttttgatggagagatagaaggtgattgagtgccttactttaaagtgcccacctctctgagaaggcacaataaggcgacatgaggaagcctgaatttgtgcccaagtctcattttgttgtctactctttcagtggacggggctgtcaccaaagatcccagctttctgtttgtccacagtgagatggtgagatggtgattcgggtgtgtttatacagccatgtaggggacacttttagaacagcaaggacttgccagcccgtgctgatgtcaggcaactcccagagtcactgaagcagcagaggggagcagctaacacagaaaaatagagacagggctctccactgcccagttttatcttctccagactcagttttccctgtgtaaaatggaaatgaagggacctcacagggggaaggggaggatggagtgcgggagttcccacaaactgagtgtgttgcccagggctggaatagtcaatggaccagggtagaaagccatgggctctttctgtttttattttttatttttgtatttaaatcaaatacactagcagggaatcaccaacaagcttggtccactgtggcttacttcaggtgctcccctccctcatggcccaacatggggtaacactgtgatgcagtaatgatgggcatttgccttggttacttttttaccatcattaccgaggtaactcatagaagagtgtttactttgggattagggttccagtgggtgagagttcatggtgcagagcagtcacagcagggaacaggggcaggaagctggagaaagggctgagagttcatgtcttttgttacttgcttgcttgattgattgcttggttgttgattggttggttggttggttggttggctagttgatttttcaagacagtttctctctgtaggtctggaattcacctagcagaccaggctgacctgacacccgtgtacatagtcctgactgtctcctaagtgctagaactaaagtcatgagccataatgctcacatcttgaaccacaacccaaaaacaaagtacaaataaaagccccagccccatgacccactggcacatttcctccaataagaccacacctccgcaaccttcccaaacagtcccaactggggaccagaccaaggactcaaacacataagcctatgggaccattctcattcaaacaaccacagagttcaaaacagtcagaatggctggggttagggatattggaccagcttggagaattcattagacaagcttggataatggggaacatcctgctgggggaagggcatgatggcattccctgaaatgatcctccctctagtccagatggagcctccaaccctcaacctgaccaagaacagagacagctacagcctgcattgggaaactcagaagatggcttactcattcattgagcacacattccaggtccagtacaagaagaaatcggacagctgggaggtgagttccaggacccaggggatgttacagacagggagtagaggaaagaaaggacattctagggagccctacttgcaaaggggatgacccctgtaccttggcacccacatggtcaacaggagacagtccaatttcttgatgagcgattcaggctcagagaggtgacatggcatggtcacatgaccagtgctgcccttgagctgaggggccagactggcagaggaatggaatgaagggttcaaagatcaccaaggcctgggtgtatttcctccatggaagaagatctgaccagtgggacagctgctgtgcgttaagctgagggcaagtcctggccagcatgcatcacacatgcaaaggcctgccagctagatgcagaccctggggcgccacagagactaaagcaggaccagtcagccaggattctagcttcagacaggaagtagggaaactgaggcaaccagagagtcagtcctaaccccaactcctaagctaggacccagcaaactagcatggtattcctggaccagacagaaattaggccaaggcacagcaacaaattgggaggtggagatagcctggtcttgggcctggatgcagctgtcagggatggaagggctgatatctggggccaccacagtggctggttatagtaggctctggaatggcatcctgggctggactagagagacaaccaatttgggggtagttgccaagaaggcagctgagcccctgaacctggctggtggctcagcttcagcacatctgcctctacaggacagcaagacagagaacctagatcgagcccatagcatggacctctcccagctggagccagacacctcatactgcgccagggtgagggtcaagcccatctctaactacgatgggatctggagcaagtggagcgaagagtacacttggaagactgactggggtatgtccctcggccaccaccacactcctgggactacatagggcaagggaggcagagagccactctaccctgtgtccatccctgtgggatacacttggtacattacacaactgtaagtgggccttagggagagagaggagctagggcccaggcctctatttatataaggctcttggctttcttagcctttgtggaagccatgataggccaagctgggtttcttgttacaatggctgccagctagtctatctatgtacacagataaattggaaggttggtgggacccattcgtcctgctgatttcccttcccttgaaccctgcagtcagtgctggtgtgtcccatagtgactgcctgacacacactgtgcaaggtggatgtggggtgggggatggtaatgaagcattccgcatagtcagccctgtcagaaggggggatctcagagtgagagtcattctggaagaaagagggctagagccatgaactccagagatggggaggggacttacaaggccccattcaagaaggctaggggaccttctgctggaaaccttcccatctcctctgaccctccctgcatcagtaagccatagcccatgctcctcatttcaagaagtcccccagttgacaagctcagtcaccccccacccagggtacttgctgctgcttagggcagaacttccccatattgaagacagggagcggacccagggtttcttcccaggttcctggcctttctcacagagggcatgggagacactagcttcctcccttagcctgcagcttgtgcctcccatctaatgctgcttctccttgttgaccaagtgatgcccacgctgtggatagtcctcatcctggtctttctcatcctcaccttgctcctgatccttcgctttggctgtgtctctgtatacaggtaagtgcactctgtgcgcagaggaaagtggaaactgggctccggggtcacagagatgacacagctggatacactctcgttcccagcctaccattcactcccctggtttcagttttctctctatacgtgggcacagaagtagctggcacagaggtctatggaatctcacatacacgtgtccccaccctcctgctgtcttccaggacgtacaggaagtggaaggaaaagatccccaaccccagcaagagcctcctgttccaggtaggaaggcaggccctgctgctggctccctgtcccattcctgtgtccgtgggaaagcgaggggaagctggaaggctaggcagcaggaggtgggtatctggtattgcctgggtgcctgaaggaggagtctcacaaattggcctgcgttctgtctggagccacagacagaactcagagccttctagtgcacaaaatggctcagaagagtcggctcctggaggtagagacagggctgagtgtctccaggacaggacttgagcactgcacagcaagatgccttagagctggtgggagagctgattgcaaccagggtgtctccagggggtcagctcctgagacaggaatgggaatgacagaaggacacggctgtccatgtctcacagaacaatggtcatggggagacaccagtgccatgagagaagaggctatagggaacagcatggctgcttacctcaggagctttagggctaagggaacacaacccctaggatgcctcttctttcttggagtcagaggcctgagctgggccctaccagggggacattcttcccatgtccagagcttatggaagacaccatatgcacatgtgtccttcctgaggtgccacattcacagacacaaatgccctttcctttgtaggatggaggtaaaggtctctggcctcctggcagcatggcagccttcgccactaagaaccccgctctccaggggccacagagcaggcttcttgctgagcaacaggggtgagtgtttgggctctgacccttggggagcctgtgggagggaacctgtccatggtgcacatcattgtagcctgtgggtctctgaatttgagaggagaggctgcccactgtagtaaacagcactccaggtagacatgaggaagactttttctgactccccggttggcgtgaaacagacaagggaccagaggcagcatcccagagcaggaagcctctccttgccaagtgacctatgtaagccctgcactgcaatggcctcatgggtgactgagagtgcacactgtgggacttcagcctgctaagcccacatgtcagggagtcagcagccccatatgggcaggtgtgaacccggccctgaaggttcacacttgctgcaaggagcagaagagagcaaacattaggatgggggtgtgaactgagccctgagcacgtgacactttgggacactggacacacaccatgtcattcacaggacctcatgcctcggtgcttactgtgaggcccagaggggattcaggccttcctagagctcacctgctctggctatacactaagtgcctaggttcaacatctctgcccctattgtcccgacagggagtcatatgcacatttggaagacaacaacgtgtcacctctcactatagaggaccctaatataattcgagttccaccatccgggcctgatacaaccccagctgcctcatccgaatccacagagcaacttcccaatgttcaagtagagggaccaactcctaacagacctaggaagcaattacccagctttgacttcaatgggccctacctggggcctccccaatcccactctctgcctgatctcccagaccagctgggttccccccaggtgggtgggagcctgaagccagcactgccaggctccttggagtacatgtgtctgccccctggaggtcaagcgcaactggttccattgtcccaggtgatggggcagggccaggctatggatgtgcagtgtgggtccagcctggagacctcagggagcccttctgtggagccaaaggagaaccctccagttgagctgagcatggaggaacaggaggcacgggacaacccagtgactctgcccataagctctgggggccctgagggcagtatgatggcctctgattatgtcactcctggagatccggtgctcactctgcccacagggcccctgtctacctctctgggcccctctctagggttgccctcagcccaaagcccccgtctctgtcttaagctgcccagggtcccctctggaagcccagctctagggccaccagggtttgaggactatgtggagctgcctccaagtgtgagccaggctgccaagtcccctccaggccatcctgctcctcctgtggcaagcagccccacagtgatcccaggagagcccagggaggaagtgggcccagcatccccacatcccgaaggcctccttgttcttcagcaggttggggactactgcttcctccctggcctgggacctggctccctctcaccacacagtaagccaccctctccaagtctgtgttctgagactgaggacctagtccaggacttgtctgtcaaaaagtttccctatcagcccatgccccaggcgccagccattcagtttttcaagtccctaaagcatcaggactacctgtccctgcccccttgggacaatagccagtctgggaaggtgtgctgagtctgtctcctcccaatctcaccagcagcctggcaccgcagcctgtggtcctcagcctgagcatcaccacagaagcctctctgagttcacactcctccttgctcccagccctgacatggcaataccccacctgtgcttttctcttccccctctgtccctcttcccctccctccatgcacccccatctctctctctgcagttttctgccttctatgggaacttccttcctattcctctgacctgttggagtggggatgaggcctgtgagggtatgggctgtttagggtttacaaacctgtgaggccggacggtggtggcgcattcccttaatcccagcactctggaggcagaggcaggcagatttctgagtttgagtccagcctggtctacaaagtgagttccaggacagccaggactatacagagaacccctgtctcgagaaaccaaaaagaaaaaaaaaaaagaactgctgaggtcggcttgtccaccacaggcattggtaatacagcacatttctggctctgtgtgaaaggtgggagtctcaggtgagccccttgggaggtcagactgtacaattgggcaggctcttgtcgctacaagaatagacatggtcctctatggttgtctgaaactcctggggagacctggggaaccttgtagagggtacttggtaccctccttatatacagaaatcactaatgtggacaagctggacacagctatggccaggctggagggatgagaagcaatgggaaggctgtgtgtctagaactcatggtctcaactgcagacaagcttagttgtggatcctggacagcacacccagatactaagtctagacagctgagctgttcgttagttctccctccagagcaaagcctagatacctgtgctcccaccggcctcagatgagggtctactgtgagactgtggcccttggccatcaccaccctcttgacaatccatgcacaatgccattacctcattctgttctcactggagttgtttgttcatggtcacgtttgcacatggcctttgtgtgtgtctcgagcattggctttttgggtggtagcgaggaagtagacttggaagttgagctcatgaacagttttgtgcttcagactgtcttttttggatgagactgaatagctcttcccacatggcctcttgtgggccacacgtgtctcccctgagtgtcctaattttgtgcaggaggcacaccagctctgtcagccattgcgtgtctgcattgctatgagatgggttgccgagccacacctgtctttgggtccctgtttgcaggggtctttgctgtaagtgcacacgtgcctttgtttatgttctttctggttccttctgtgtctaaagccttgagtgagagacttggagttttctagaacacatgatctctctacagagttcagtcttgatgtgttctatggacctggagtcaatggacattgtatcatttcttcacctatttgtgctctgtcaggcactccatgatccaccaagtcatgaactggatctggtctgtcctatcccctggcctcactcacatgatggcagacatagaatgtggcagatcaaatgtcccttggtctctgttcattgcagcaaagaaaaccactaacatcttgagtgtgttgcagtggcaatgttcaacatcagcctgtcaatactttccaaagtgaccactctagagaaacaaacaggagtggcctccatgttaagatgtgaatgccaaagtgccttgcataagaggaaatattgtaataaacatgtttacatacaataaaacagcaaaacaaggcagtgtgtgtgtgtgtttgtgtgtgtatgtgtgtgtgtgtgtgtgtgtgtgtgtgtgtgtttatgtgtgtgttggaaggttggggatggggacagttccaacccatgggtgccttgtcaagtaactgggttccatagacagggcacttgatacgcaagacccttgcaccctctcagaggcgaataggatgggacatggggtgggagtggggacttgtggaggaggaaccagagggagaacagcaatcagaaggtaaagtgcacaaataaattaactaatggaaaaatagaaatataaatattattgaaggcttcaaaaggaaatcataatcacttagtttcctacagaaaaggcaaagatctacattggaagaaagactaatggttctaacacaacaccactcttcatgcagaaggatgaaattcaattcagaccttccactacatacaaaataaattctaattatatcaattctgagggctgatgaacgccaccctctctgtgtcttatttgggatcatgatgacttggggagacacaaatattacaccatccttcgaggttaagaacacctagcatggtgtgtgtgtcattgtggaatgcaccactggggaagagctggtgagaacgttatgaaatttgagtaactgaagcagaagaggctcagacagtcttgaagaatttaattcttaccaaaaccatttgcacaccactggcattgcttacggaaacttcagacttgggaacaggataacagatgtgcaaggaaaagtgaaactgactttgatttggccaagctattgaacaatggggcaaaggggaagggcttctgtagcaatacaagacattctggctccagaactccttgggcagtttcagtgtggatctgctgctcagtgctagcattgatgaacactgttttctggctgaaagccttggtgtcctggctctaaaaggatctcacctaatttggggttggggggaggttcatagttgagattcaccttctctgttgcaagaatgtcaaactcccaggctctaggagtggtgacctcacatggtcccagaagacacactgatctccggcagagttgccctcccagtgtggcaggacaatgacttcaggagcacaaaggaacctgataaggcctaggaatcagccaagggagtgctagtgctcagactgataaaaagcctaggctcatttgggcaagcatatttttaagaggcagaaggactggcccatcacctcccagagtttcccgattagatttagaggaaataacatcacaactctaacactcaactcgagagttctaaatcaagcaagggctaaagccaggatgcagttcctttagagggttgctgggattctcacagagctcacgctgggtcacatgggagggatctgatgttgggtcatgtggtcccaccaatgccaaagactctgaaatgtctctgtgaggagaaccctggagatgggcaggatcatttctcatgccttccccttcctcttcacatgggtgattgttgaatttcagggaaaggaaaaaggagacaaacagaaaaaacttaggcacagactcatgcctgattaaagtgctggaacaagcaaccattgtgtgcccagccctaagcagagcagggatatctaccctccaaggctaaggaaactccatggaagagggaaggagagtgtgtgcaagggccgggtgatgggagtaactgctgtgaagcactgacttcttgatataacatggccattacactcatattacactccggttataaggataaggcgtcccttgtcacgtttctataaatctttaactctcagcaattgccaagaggaacaatgctatgttcttctgcagtgatgttttcatgtccccacaaagaaattccactcacactcacataagcagccctatttaaacacggttcctcaaacccacaaagcaaagatttgaaaacaggagggctactcaccaggaagaactggaggtttagcaggtattggaaaggtaatgagagacaatgggggggggggcgggggacacaaccaaactgtatcttgtacatgtatgaaagaataatgaagacatatagaattgattgttgttacagtagacacgagagtgcagagatgccttcagggaaccttgactggaattggcacagagcaggacacgcagcatgctacatctgtggttcctaagacaatagtgtccatggttggagatttagtcttttatcgtgtggactcctaccttcctgttatacacacttacagatagagtcaggccttcccattccaggcttactattgatttcctccatttccaatgctgcatccacagttgttttgtaacagaagaaataacctatgtaaaagtacaaagcaaagaaaatatgtctatagtttacattttattttgggtactgtaatctccaaggataaacacatccttgccatggtgtctcagcggtgagcagggctcctgctttgctaaaagctgactttcatcctttgctcattgtcaggaccaagaggagaagatcatggaccgtggcctttgaacctcttccctaagccatgggtggagacatgatctgggactctaccctttctgcccatggatgcttgggcactaagaacagcttctcagggactgggagggctggagagatggctcagaggttaggagcacttactgctcttccaaaggttctgagttcaactcccagcaactacatggtggttcacaaccatctgtagtgggatctgacgccctcttctggtgtgtttggagacagcaacagtgtactcataaataaaataattctttaaaaaaaaaaaagaaaagaacagcttctctcaaagtctgactgttgcactgtgtctgcaacctgaaagacagacagaaagctggctgtcgggagtgttcctcctattcaccgagaagagtaccaaatatctaaaaggtacacaatccatgtggtttatgcttaatccctaacctctctgggagtccggcaagttggtgtatctaagtagaacgcactcctgggacaagccaacagtaaactctggcatcctgttttgttatctatgttttgcccaagcgaacatttcacacattcatgacaatgcattaccagagaaagacagtctatcctgtgtgactctgtaagagaagtcccatgtgggctcatacctccttgcctcagaagcccccctccccactcattcctctgtattagtcaatactactgcaggtgtcaactgtgctgagacctgtatgtggggctataaatcgcaagatgaagccccccagcctgggaaccccctggtgtctcagcaccttcaggagcttggtcttcttccagaacattccatctcttgctgttcacctccttggccttatttcatgccacaggacttggcagcacgccacacagggactcctcctgtgggagaaatcacagggccatcagttcaatttgatggaatttgataccaggttctctgtgtacaaggccttgctagattaattggtccctttcaataaggccatactgaacatttgtcagtttgtaatgaggggcttgcctggccttatttgtttacagatttcgttttcagattataaatgatatttctattgttctgtgtgactacatcattgagtggttcagaaagagttcagtagcattgaagtaagcaagagaagtggttatcctaatcagattttcctattcattccttccttatttaaatgtgtatatatgtttgtttatgggtgtacaccagccacggttcacatgtggaggtcagaagacaacttggaggagccacttccatcctcccaacaagtgtgatccagagactgaactcacagcatcgggcttcgtggcaggtgtctacacctgctcagccttttgagtacccacctgattaagtctctgtacaaaatctccttattctgatactttagtaatcagttcagaatatattgagcaacttctggattcactaatttcttttctcttctcttctcttctcttctcttctcttctcttctcttctcttcttttcttttcttttcagatttctttattttatgtatgtgaggacactgttgctgtctccagaaacgccagaagagggcaccagatggttgtgagctaccatgtggttgctagggattgaactcaggacctctggagtgcagttgatgctcttaacctctgagccatctctccagccctggattcactaatttcataaacaaaaacaataaaaattctaacaaacaatttaaatttcagctaatctacaaatagtaaaaagagattcgccaattatatgtcaaagctcccctttccttcattcccacctccatgtagttgtcatagccgtccttcatagccgtcggtcacaagccaactaggaaatgaaagttcagggaggcattttaacacagatctacctgagtgcgaacggtttctgctccgtgctacttgactttcaggtgttgctgtgcttatcaataggatagatagcattcttgtataagtgtatttgtaaagaaagtatatttgtgattgaaatgacagaacagtaatcaattattgtggagctcatgactatgatgtcaattctgaaggaatttcaacacaggagaaagaagttgccctggcgcaatggcacgctctaaggggcacagaggaagttcctgctcagggcagctcggcatgaccagaggactcagcaagcaggggtgagggggaagggaagatcaactgtatggtttaggctcaacaggtcagatgaaggtggaaggagatgtgggtgagaatggaggtcccgctgggatagcaggctgctcaggacagctcggcatgcccagaggactcagcaagcagggaagatgggtggggggagggatgcttacctgtatggttcaggcttggtatctcaaggattcttttgataggaatcaaggatgcacaaatcaaggctcagctaggctcatgctttgatggtgttgctagcaatatcagggcttttttccccttgtggttttaatctcatggatgaataattcagtaagactcttgaaagaagctcatgaacaatttcattcaagtgttgtaagagaaacaagacaagctagctggaagcctcgggagctgcaaacaagattgaatgacaaagatggaagaaagccattcccgttgtaatggacatcgccgagcagccatgtttaggaaaaatgtgcaaatgatcaagatagaacgtgagagggtccagagtgtacagcaatgcagaaatgcagtcatcatctttggatggcactggaaaaatagaaggaagaagaggaagaagaggaggaggtagaagaagacaaagaccgatgactacaaagacaatgaaggaggaggaggagaaggaggagaaggagaaggaggacagggaggaggagaacaaggaggaggaggagaggaaggaggaggaggagggcagagaggagaaggaggaagaggagaatcatcactcttttctgaaataggactgtggtggattaaatggaaatgggccccataggttcataaagagtggcattattaagtgctgtggctttgctagaggagatatggacctattgaaggacctgtttcactgggggtgggcatttaggcttcaatgctcaagccaggcccagtgtctgtgattatggtttctcttcacagcaataagactctaagatggaagttggtagcggggccaggggaactgccatggcaggccagacaatgctttcgtttggaggaatatggaaccctttggggctttgaactagaagagcaattgggcaattcaagcaaggtttactgggtcatactagctggagcatggaacacaatggtgctaagggttatttaaactgtgtggacacaattcgggaggattcagagggggatattagtatggggcccagaaacaattcttgtgatgttttggctaagaacatggctgctttctgccattatgtaaaaagccaacctgaggctaaattgaagagttatgcattaaaagctttggcggaggacagtgagaagctgcctagcatgggctgtgtcatatggctcttgctggtctgacttacacagttctatgatgaaaatgaacaagctgagctaggaaaaatacaaaatgtagtttgcgaaagggagcaccaggaagttcaatggagttcaatcctgtgttcaaggacataaaaagattaaagaaatacttgatgttagatggaatacagggaatggttgatgtcaaggtaagatgccgccctgccaagcttccaacacatggaaaggtatttaagcaaagcgtagggcctggcacatgccttaatacctgaagtggggaggcagagacaagcagatctcaaagttcaagaccaacctggttttcagagcaatttccaggacatccaagcttaggcagtgaagaaaaccattgaaaccagaaagctggtgaaaatgtatttgaaagagaaggtaatgtattttaataaagaggccatgttccagcctcagcgagtaatggaacttggcagcttcagctatgtggttatgagttcagagacaaggatataagaaaggagttgtagaatctccctccatgtcaaaagaaagtccctgaagccagacttactgaatggaggcctaaagaagccattgcatgaatctgtgaagatgaagcctggatcgccctagagaccctgagatgctgaagatgcccaaggctctttggcatccctgctgaagaaggctgctaacactgggttggatcagccctagaaaaggaagtgtgatacagtcagcaaggctgaaaggagctggagatctgaagagtgttttgacatgaagatgcagagttcggagtttgtccatctggctgtcagtcttgttttggtccagcattttctcactatgctctatgtataccctttgggaatggtaatgtatatcctgcgccattaattgttggaagtatgtgacctgcttcttcgttttgactttacagggggactacagttaagagactgggtgagtctcagaagagactttgaactttaggctttaaaacagtgctggtgctgtgatagactacaggaactttcaaaggaagactcaatggattttgcattgtgatatgactgcaagactatgggcagagtggggtggaatgtaattgtttgagtgaaaatgaccctgatagcttcacagggagtggcactattaggaggtgtggctttgttggaataggtgtggcttttttggagaaagtgtgccaccgaggatgaaccttgagttccaaatgcgcaggtcaggtccaatgtccctttctcttcctactgaccatcaattcagatgtaaaactcttagctatctctccaatactatgtctgcctgcatttcatgcttcccaacatgataatgaactgtaagctgacaccaattaaatgtttttcttcagaagacctgctgagttcctgactgctttctcggaggccatggaagcaccagggtccagaggtaacaccctatcccctgtccacaacctcccttaaaagtggaccctatatccccaactctctatattcttgcccaccactctagcagctttcccagaagccatgtgggcattagggaccccaggttagacatggtcctctgcacactaactcccttaaaacatacccaacagccttaaactataccccatttcctgggcaccagattagacatcatattagacatcacaactttggtagatctctgctttctcagaggccatgctggttctaggaacctcagaggcaatattggttcccaaaatcccagaggtcacccaggtcacaaaaaccccagtagagatgccctactggacctgaactctggctggtcaccagaactgcaggcaacctgggccagaagaccagagaagaaacagaatcaaggaaatatcagcaaaaaacactcagcgatctaacaaagatgaactcagaaatcagcacctaaacccataataacccttaacccggataactaggaaccaggacaaaatcaacagcagccagggaaatatagcacaatattgcccaaggcctgaacaatcaaatgccttaaagaaatactggaaaatacagacaaacaggtaaagaaaatcaatataaactgttcaaaacctgaatatggacatagaagcaataaagaaaacagaaagtaagggaaaacaaaagatagaaaatc

SEQ ID NO: 291 - DNA, 3112 bp, Mus musculus
gagctgactgggagatggtggggagcgagctactctggcagaactaaatgtcatggggcacagataaataggaagagcctgcaactcactggcacttggaggctcccgaaggaggctgcctgtcgcccaagcacagagccacaaaggatgcagtctaggagggaagaatcacaagccctgtaagatgagtggagccaaacccccagccaagcaccaatacagaaccccgggacaatgaggacacccccctgcccatagcttccagtgcagccaccaaaagtgccaaaatggaccagcaaatggcactcacatgggggctgtgctacatggcactggtggctctctgttggggacacggggtgacagaggcagaagaaacggtccctctgaagactctgcagtgctacaatgactacaccaaccacatcatctgcagctgggcggacacagaggatgcccaggggctaatcaacatgaccctctatcaccagctagagaaaaaacagccagtgtcctgtgagctcagtgaggaactcatgtggtcagagtgcccgtcatcccaccgctgtgtgcccagaagatgtgtcatcccctatacacgattttccatcacaaacgaagactactactccttccggccagatagtgatctgggcatccagctcatggtgccacttgcccagaatgtgcagccaccacttcccaagaacgtcagcatcagctcctctgaggatcgtttcctgctggagtggagtgtgtcccttggggatgcccaggtctcctggctttcatcaaaggacatagagtttgaggtggcttataagcggcttcaggactcctgggaggatgcctacagtctccacactagcaaatttcaggtgaatttcgagccaaagctattcctacccaacagcatctatgctgcccgtgtgcgcactcggctgtccccgggttcaagcttgtctgggagacccagcagatggagcccagaggttcactgggactcccagccaggggacaaggcccagccacagaaccttcaatgcttctttgatgggatccagtccctccactgctcctgggaggtgtggacccagacgactggctctgtttcctttgggctcttctatcgccccagccctgtagctccggaggagaaatgctctccggtggtgaaggagccgccgggggccagtgtctacacccgctaccattgcagtctacctgtgcctgagcccagtgcacacagccagtacacagtctctgttaagcacctggaacaagggaagttcatcatgagctataaccacatccagatggagcctccaaccctcaacctgaccaagaacagagacagctacagcctgcattgggaaactcagaagatggcttactcattcattgagcacacattccaggtccagtacaagaagaaatcggacagctgggaggacagcaagacagagaacctagatcgagcccatagcatggacctctcccagctggagccagacacctcatactgcgccagggtgagggtcaagcccatctctaactacgatgggatctggagcaagtggagcgaagagtacacttggaagactgactgggtgatgcccacgctgtggatagtcctcatcctggtctttctcatcctcaccttgctcctgatccttcgctttggctgtgtctctgtatacaggacgtacaggaagtggaaggaaaagatccccaaccccagcaagagcctcctgttccaggatggaggtaaaggtctctggcctcctggcagcatggcagccttcgccactaagaaccccgctctccaggggccacagagcaggcttcttgctgagcaacagggggagtcatatgcacatttggaagacaacaacgtgtcacctctcactatagaggaccctaatataattcgagttccaccatccgggcctgatacaaccccagctgcctcatccgaatccacagagcaacttcccaatgttcaagtagagggaccaactcctaacagacctaggaagcaattacccagctttgacttcaatgggccctacctggggcctccccaatcccactctctgcctgatctcccagaccagctgggttccccccaggtgggtgggagcctgaagccagcactgccaggctccttggagtacatgtgtctgccccctggaggtcaagcgcaactggttccattgtcccaggtgatggggcagggccaggctatggatgtgcagtgtgggtccagcctggagacctcagggagcccttctgtggagccaaaggagaaccctccagttgagctgagcatggaggaacaggaggcacgggacaacccagtgactctgcccataagctctgggggccctgagggcagtatgatggcctctgattatgtcactcctggagatccggtgctcactctgcccacagggcccctgtctacctctctgggcccctctctagggttgccctcagcccaaagcccccgtctctgtcttaagctgcccagggtcccctctggaagcccagctctagggccaccagggtttgaggactatgtggagctgcctccaagtgtgagccaggctgccaagtcccctccaggccatcctgctcctcctgtggcaagcagccccacagtgatcccaggagagcccagggaggaagtgggcccagcatccccacatcccgaaggcctccttgttcttcagcaggttggggactactgcttcctccctggcctgggacctggctccctctcaccacacagtaagccaccctctccaagtctgtgttctgagactgaggacctagtccaggacttgtctgtcaaaaagtttccctatcagcccatgccccaggcgccagccattcagtttttcaagtccctaaagcatcaggactacctgtccctgcccccttgggacaatagccagtctgggaaggtgtgctgagtctgtctcctcccaatctcaccagcagcctggcaccgcagcctgtggtcctcagcctgagcatcaccacagaagcctctctgagttcacactcctccttgctcccagccctgacatggcaataccccacctgt

SEQ ID NO: 292 - protein, 890 aa, Mus musculus
MDQQMALTWGLCYMALVCWGHGVTEAEETVPLKTLQCYNDYTNHIICSWADTEDAQGLINMTLYHQLEKKQPVSCELSEELMWSECPSSHRCVPRRCVIPYTRFSITNEDYYSFRPDSDLGIQLMVPLAQNVQPPLPKNVSISSSEDRFLLEWSVSLGDAQVSWLSSKDIEFEVAYKRLQDSWEDAYSLHTSKFQVNFEPKLFLPNSIYAARVRTRLSPGSSLSGRPSRWSPEVHWDSQPGDKAQPQNLQCFFDGIQSLHCSWEVWTQTTGSVSFGLFYRPSPVAPEEKCSPVVKEPPGASVYTRYHCSLPVPEPSAHSQYTVSVKHLEQGKFIMSYNHIQMEPPTLNLTKNRDSYSLHWETQKMAYSFIEHTFQVQYKKKSDSWEDSKTENLDRAHSMDLSQLEPDTSYCARVRVKPISNYDGIWSKWSEEYTWKTDWVMPTLWIVLILVFLILTLLLILRFGCVSVYRYKWKEKIPNPSKSLLFQDGGKGLWPPGSMAAFATKNPALQGPQSRLLAEQQGESYAHLEDNNVSPLTIEDPNIIRVPPSGPDTTPAASSESTEQLPNVQVEGPTPNRPRKQLPSFDFNGPYLGPPQSHSLPDLPDQLGSPQVGGSLKPALPGSLEYMCLPPGGQAQLVPLSQVMGQGQAMDVQCGSSLETSGSPSVEPKENPPVELSMEEQEARDNPVTLPISSGGPEGSMMASDYVTPGDPVLTLPTGPLSTSLGPSLGLPSAQSPRLCLKLPRVPSGSPALGPPGFEDYVELPPSVSQAAKSPPGHPAPPVASSPTVIPGEPREEVGPDHPEGLLVLQQVGDYCFLPGLGPGSLSPHSKPPSPSLCSETEDLVQDLSVKKFPYQPMPQAPAIQFFKSLKHQDYLSLPPWDNSQSGKVC

SEQ ID NO: 293 - DNA, 46830 bp, Homo sapiens
ggattgtgtatctcccctgcaagactataacagtctcaaaggcctcattttttctggtcaccactatgtcctaagtgcccagagcaagggcttggctcccagtaggtgtttagaagggttagtagaatgaagtgaatgacagaatggggagaaggacggggtttgggaaggagcctggggccaaaaaaaaaaaaaaggtttctgcttttagagctgggtgcagcctgattatttacggctgagggaaaaacaacttggtttgaaaacatagaagagagaaacgggaattcgtgacgcaaggtcttaggagagatgagtttcagagcaggcttggggaaaatgacctggttcaaggaagctgggaagggtgaagctacgtacggctggaaggtaggtttctggagtgtcttaaataactctaagggcttagagtcaaggccctgggtattgggaattccctgggtgatgggtttgtttgtttgtttgtttgttttttgagacagagtctcactctgttgcccaagttggagtgcagtggtgcgatctcggttcactgccacctccacctcccgggttcaaacgattctcctgcctcagcctccggaatatctgggattacacaggtgtgcagcaccaagcccagctaattttgtatttttagtaaagagggggtttcaccatgatggccaggctggtctcgacctcctgacctcaagtggggttttttgagcaagggagcagcacatcactctggtgaccattcagggtcattgtgccgtacaactcaggagaaaccatttacaatcccatagaacacaatgggaatggcgccccctggagttgtgcaaacatggcagccccgtgaggaagggcaggagctaagaggggtatgaggcaggaccttctggtgggaagctcttggagatttaattaaggtctgactagggggttgcaggagggacagcaaaatgatcacaaatgcagtctgacagcaggtgggatggtaagagggcacgagggcctgagtgtaacttgtttatggaaggaccttcaggaccggggctggctgcactagggagataataaattgaggttttggtagttgccgttgctcaagaacaaagaaggaactccacttagatatggtaacattgaaaaaaatatatatgatggtagataaattcccaggtaagacccatagagggaatttagaacttaccccaaaaagcactattggaaaaatctggaacttttgagattgatgtagggaggccacacatgtcctactgaaatcaccttttagtgtctttcctacttgatctaatcgcctcctgtctgctcccttcaattcaactatatcctagtccattcaataaacattaattgagcatctacaattcctcaacattagagatcaaaaataaacgatataatccctgctcctgattggctgtcaggctagtgagagagacagaagcataagcagctacaacagaacatggaagatgctcaactagggtttctgcagaggaacaggggagggcagaggcaggatctcaccaagtttcctgtgcatgtggggcaatgttgagcctcccttggtcatctttattcccaaagtcccagaagctggagcacagggcgaagaaagagtagaaagcttggaccccacatttgctcctggattcctcactgaggccataagaggtagcgctggcctcagctcagcccctgagtggctgtgaccttgggatgccacttgctacctgtgagcctggaagtgggtcttgggccagtcctactggaggttcccttgactgcatggtgttctcacagttacacagttagccaggtcagacagtagatctcaaggagggcaaaagccgccacctccaagaaggctgccagatacaccttttgctctgcctgacaagaacctccacagattccaaggtccagctctaggggtgcctcctctgtggatcctcctctgaccccctcagagataagtctctggcttccacgtgcttctgctctgagtggggggttctccttctgctgcataggacagagaggacatccaactcagagtagaagcatgccctctctaagttgtaaattcgatgatgtcatctccatatttcattgcctggcatatagtaggtgttcagtgctctttgaaaggatgaatacattaacaaatgtcaaaatctttttttttttttttttttgagacggagtcttgctctgttgcccaggctggagtgcagtggtgcgatcttggctcactgcaagctctgactcccgggttcatgccattctcctgcctcagcctccggagtagttgggactacagtcgcctgccaccatgcccggctaatttttttttgtattttttttagtagagatggggtttcaccgtgttagccaggatggtctcgatctcctgacctcgtgatccgcccaccttggcctcccaaagtgttgggattacaggcgtgagccaccacacccggccacaaatgtcaaaatctcatatccttcacagtgcccatgtcactgcccctagaagtcttcccatgcctcccttactgagtcatctctcttttccccatactccaataggatgctgtttgaatgcctacgctagaacagggctggcaaactttttctgtaagggaccagatagtaaatatggccttgccagacgtaaagtatctgctttaatgacttcactttgtcactgcagcacaaaaacattgtgcagccacagagaacaaaaatgaatgagtgtagctgtgttccaataaaactttatgggccgggtgcgatagctcatgcctgtaacccaagcactttgggaggccaaggcgggcagatcacttgcagtcaggagttcaagaccagcctggtcaacatggtgaaaccccatctctactaaaaatacaaaaattagctgggcatggtggcaggtgcctgcaatcccagctactcgggaggctgaggcacgagaatcgcttgaacccaaaaggcagaggttgcagtgagccaagatcgcaccattgcaatccggcttgggggacaagagcaaaactctgtctcaaaaacaaaaaacaaacaaaaaaaaagtgcactaacctgacccggtggtgccaggcttctcactaggcagtcggtctggcaccagaatccggacttctcagctacacactctgtgcaggctctggaagtctggcgaggccaggttttgcctgtccagcctgggctctctctggcccttctagcagcatcaacagtgacttcgggaggctgaggcatgagaatcacttaaaccccggaggcggaggttgcagtgagctgagatcatgccattgcactccagccagggtgacagagcgagactgtctcaaaaaaaaaaaaaaaaactatttatggacactgatatttgaatttcatgtaatttccacatcacaaaatattattcttattttgctatttttaaaaacattaaaaattaaaaaagaaaacatttttagctcatgggctgagctaaaagaggctgcagtctatgtttggtgtgtagaccagagtgcaccaacacctgcttgagagcttactaagatcggcttgctaataggcttattttggtctcgcctattagcctataaaaagaagagttaggaacacagcctttggatgcagatgggtctgtattaatattctgatcccagactccctctctctttttcttccttttcggtcaaagtcactgggcaggtctgctaagggccagaaggcagtccaagggcagccaggactcaaacaaggagggtgtgtcaatttcctagggctgtcataacagaaactgggtggctagaataacaaccatgtcttttctcactgttctggaggctagaagtccaaagtcaaggtgctggcaccgccatactctctgatgtctccagggagaatgcttcctgccttcttccagcttctggtggctgctggcaatccctggtgatccttaacttgtgggatccctccagtcacatgactttcttcttcctgtgtgtcttcagttgttttatctctagggctgtctgtctccgtgtccacactttccccattttataaggacatcggtcatattggattatggcccacccataagacctcattttagcttgattacttctgtaaagaccctatttccaaataaggtcatattctgacatactggggattagaacttctgcatatctttttgggagacacaagccaacctcataacagagggtgtcagtacagggcaggacccaacccagcatggaagtgggctatattcagtggggcaggaggaggggagaagctatgtaaatacactgacaacaatagtgtagtttcacacagataagaagggaggtacagatatagacagagagaaagctagaaagaaccctgtggtgttggattggaactggcagtataagtgtgaactcatggttttcaaaatgataggtatagaaataaatacagctggtcggacgtggtggctcaagcctgtaatcccagcactttgggaggccgaggcaggtggatcacttgaagtcaggagttcaagaccagcctgaccaacatggtgaaaccccgtctctacaaaaaaaaaaaaaaaaaaaattagccgggcgtggtggtgcatgcctgtaatcccagctacttgggaggctgaggcaggagaatggcttgaacctgggaggcagaagttgcaatgagccgagatcgtgccattgaactccagcctgggcaacaagagcaatactccgtctcaaaaaaagaaaaaaaatatagctgtaagtacaatatacgcatttgttcattcattctctggctctgtccagtgagagacctgaggacagtgacacttgggcagcagggagcaagatcaccttgtgtgtgtatcttggctctaaataccattctctactatgaggaacccaagccccttggagaaaattcccaagtccgagcccagggcaaggtaaataggagaggagatgagcatttcatgctgcctgaaagtcagggaggtcttaaagaacgatggggatcattgaaaaggacacaggagcccatttgaaggagctgtcactggccaaagttggcatgatttgagcattaaaataaatcatggtaggtactgactgtaagccatttaataaaatagaaatccgtgagtccacactgattatataagttaacaaagaacacaagaaggaaaacaaactcttccttaggtagaatgccaactattaaatacaaaaggaatggtgacattttatttatttatttatttaacaatagcaacttttattttagactcagggggtgtacgtgcccctttgttatctcataatactttagcattttagaatagttttttctaattctgtgaaaaatgataattcatatcccaaaccacatggtaagtgtagtacccgggtagttagttcttcaatccttgcctctctgcctcacccctctaagtagttccctgtgtctattgttgccatctttatgcccattagcacccaatgtttagctcccacttataagtgaaaatatacagtatttggttttctgttcctgcattaatttgcttaggataatggcttccagctgcatctatgctgctgcaaaggacatatttcattctttttatggctgtgtagtattccgtgggtgtatatataccacatttcctttatccagtccactgttaacgggcaaccaggttgattccatgtctttgctattgtgaatagtgccgcaatgaacatatgagcacaggtgtctttttggatatatactcagtaatgggattgctgggtcaaatggttgttctgctttaagttttttaagaaatctccaaactgctttccacaatggctgaactaatttacattcctatcaatagcatataagcatttgcttttctctgctgcctcaccagcgtctattgttttatgactttttaataatagtcattccaactgatgtgagatagcatctcattgtggttttgatttgcatctctctgatgattagtgatattgagcatttttcatatctgttggctgcttgtatgtcttctttggagaagtgtctgttcatttcttttgcccactttttattggggttattttattttattttattttttgcttgctgaattgcctaagttctgtacagattctgaatattagacccttgctgcatgcagtgtgcgaatattttctcccattctgtaggttgtctgtttactctgttgatagtgtcctttgctgtgcagaagctttttagtttacttaggacccacttgtcaatttttgtttatattgcaattgcttttaagaacttagtcataaatttttccccaagaatgatgtctagagtggtgcttcctaggttttcttctaggattcttataatttgaggtcctacatttaaacttttaatccatcttgagttaatttttgtatatggtgaaaggtaagggtccagtttcattcttttgtgtatggctggccagctatcgtatcaccatttattgaatagggagtgcttcccccattgcttatttctgtcagctttgttgaagatcagatggctgcgggtattcagctttatttctgtgttccattggtctatgtgtctgtttttataccagtgctatgctgcttcgattattgtagccttagtatagttttaatttgtgtaatgtgatgcctcaggctttgttcttttggctcaggattgttttggctattcgagcttttttttggttccatatgaattttagaatagttttttctaattctgtgaaaaatgacagtggtagtttgacaggaatagcattgagtttgtggaatgctttgggtgtatggccattgtaatgatactgattcttccaatccatgagcatggaatgtttttccaattgtttgtgtcatctatgatgtcttttaccagtgctttgtggttctccttgtagagatcttttatgaccttgcttagctgcattcctaagtattttatttgtgtgtgtgtgtgtgtgactattgcaaatgggattgcattcttgatttggctctcagcttgaactttattggtgcacagaaatactactgatttgtgcacattgattttgtttccaactttatagaagttgttcatcagttcccggggacttttggtggagtctttagggttttctaggtataaaatcatatcatcaaggaagagagaaagtttgacttcttcttttcctatttggatgtcttttatttctttctcttgttagattgctctggctaggacttctgaatgacagaatttttaaaagtcaccatttggcaatgatcatcatgataatgtttaattaaattaaggaacatcattgcatactgaaattatacaagtgtgggagtgggatgagaaagcttaaaagtatctccctaccaaatgcttataaattacgatgtggaaggggaagtaactttacaatagagaaacttgattggtgtcaagttaatcaaatgatcagagcgaacgacattagtgatgggacagattgacaatgaaagctaataggactcaccaagaataatccagcatcacttctgtgctattttggccaaaaaagcataacccagttctaatcatcagacagagccaaatcgagggacattattcaaaacaaccaacctgcagtcttcgagatgtcgaggaaaaaacaaggcatctgtttcaaactggaggcccgaaagacatggcaactaagagccatgcatttagagagaatgcaaagtcccggatggattttcttgttacaaaaccattattgagaagcttagcgaaactcaaagggggtttccacatgaagggtatgtgagagttctttgtatcattcctttaacgctctgtattttgaaatagtttcagaataaaaatggaaatggaaaaaaatgcaatgttaacatatacgagttactactttcaacaagttatcttccttttcatgcctcaatttcttcatctgtaaggtgaagacagtaacagctacataaaggttattgggaagagatggagaagcccccagccgaaggtctgctcacagcgtaaatgctcaagccctggtcattatgagtactacgttcttgccaacattttcttgggtttcttagtctctaaaagatcgtcaattgcaagacacggtattttacataccactgaaggaaaaaacaaacaaacaaacgaaaacattcaatgaattcctgacggtgtgattcttctcgcttagaacttttaatacttattgagagaactctgttagactcattcaaatgtagatttttatcccctgctgctctatgatgacttttaaaaggaaagggtcagtcaagtgaattggctgaggtgttcctaaagctccttcacattttgggtctggtgtccggagtgattttgactcagagtctcgggttcttcgtttctccaccagacagcatcctctgtgctcctgagggcatccaggcccgcagcctcccagtcccacagaggacctcagcaaagacaggcagagtggggacacctgggagaaaagagagcccgggacgtcactttaattccatcctctccagccctggagaagcccctgcagggtttttccatgccaggcagggacctcacactgaccggagtgcctgagagaaccacacatgccttcctctaccctgggctttctctgctagggtgaggccctgccagctcttcctggccaaccctgcccttcctggtaggaggaaagcaaagaacaacaatcaggccagaattccagtggcttcgaggcaggttcctgcccctccatttcctccattcccctcattcttgccctccattcccctcattcctgcctgctgccctttctcctgggaggcagccccatgtaggagaaatatgactgcgttttgttgtgtcttggcactgtgattcatcttgtctttattcaaacttttcatatttggttcaccgtgaatagtttctgcatcagttgggatttttttaaaccatattgcattaaaatattacttacaacaattactgaatttttaaatgcctgtttaaattttgagcacgagagactgcctcactcacctgaccttaattctgctggccctgctgtgctcatggagccactcattcattcattcattcattcattcattcattcattcatctattcatttgcacacagtcaaaggtgcaatttctcctctgtaccaggccatgtgctaggtatttgggagggaagtgcaagccggacacaagccagcactgaagatagtgtcagaagaaagacagccatgaacacacatgaccatatgacacatggtggggtggggcggcagggcaaagaggacatcggggaaatcaacatgccaccagctaccacttgtagggggttctcctgtggccagctctgagctaaggtcttcctgcacagaatctcactggattccctcaacagtccttccaggtttgtagatgcttctgcaaaagtaacagacagatggatgtcccgaggcttggggaagtaacacgcagatgatttgcacaaggacacgctttaagaagcagtggacttggaagtccaacacagatctgtctggctctgggctcaaaccagctattgttattgcagccacttccacctgcatccccatcaagcagtcagggaaggctgcatggaggaggccctgcgtcagctgaggcttgaaggaggcctaggagtttataggaaggtaaattggagtaggaggctttctggaagtaagaaaagtcacgtgcactattagcaaagtaggcctgggccggcactgcttcctctttctgcttctctgtttcctgatgacatcaacataaataggaaacgtgggaggctcactctgcctagaggctccagaagaagactggtctctcccaccacacagaggtatggcccggcgtccaggagcagggctgaggggtggggtcagagcaggggggaatgtggggagtccaggatgaaaaaggacagggggagcctggggggcgtcctgtgggtagctgtgccctggggacttggaggagttagggcttggcctcttaggatgacctgagcccagactcctagggcggccagtggatggggaggcagccaggggtgccaagctgcttgggtgttgtaggagagctctggggaggactcagcctcgctagcgggatctggttggtcctggtgggaaggacgcctagtggggtgaagagagctcaggcctgggagtcaggcacctatagtctgtcttcgctttgtcactaagatgctggtggtagtgagagcaccccctgtccaccctgggcttctgtctcctcatctgtggaatggggagcatggatagtccctgacatcttggtttagaaagagagagaacgcatgctcgtgtgtttgcccgtgtgtgcatttgtgtgtgtgcctgtgtgtgtatgtgcatgtgcggatgtctggggatgcaggagtgcagagagactaagaggcagagggtgaaacctggaagcttgctgcgctgaggcccagagctgggtgcggtgtggcttgagaagctcactttgaacttgagaaagagcccagcactttgcccagagacataccaggcactatccagcaatctctctctctctctctctctctctcagtctctctctctgtctgtctgtctttttagttatgacactctgccctgctgatttgggttgctgatttgggttggggcccaggtgtgtgtgttctgtacccaagtatgctggctgggtgggtgggtatctggggtgcctgcttcagggtgtgtgcaggtgtgtgtactggccctgagaatgaaagggcaggtgtttcactgggaccttgtcagacaggtgctagcgacaagctgcatatgtgcaatttttagtcttcaaaaaccctgctgttatatttttgtacagcccaattctaatttttttctatcatctttcctgctttgtaatcattttataatgagtaaacatttcctattagcttttggtcactctttttttcatccagcagttttatttatattgttccagtatacagatataccaacaccacaggataattcatgagttgtataaggaatgtatttaatgctaaacaagcaactacacagaaacctaccttcatgaaaattagaataatctagaattatgtagcacaagagacaaagtccccagcaatttcttttccctagttccatagcttattcttttcaccacatgtattcttccagaacattttctaagcatgatacaagcatatagtttttcttttcctgtttgttttttgttttgttttgttttgtttttgtgacagagttttactcttgtcgcccaggctggaatgcagtggtgcaatcttggctcactgcaacctctgcctcccgggttcaggtgattctcctgcctcagcctcctgagtagccgggattacaggcatgagccaccacacgtggctaatttttgtatttttagtagagacagggtttcaccatattggccaggctggtctcgaactcctgacctcagatgatccgcctgtctcagcctcccaaaatgctgggattacaggcttgagccactgtgccaggctggtagtttttctttttacagaaatgggattattttatttatatatatatatatatatattcctaattttttcacttaatattgtattttggaatatttccaaatttctacaataatacatacagatttaactcgttaagtaaccctaagaaatatgtggcatttattaggatgggtacaccacaattcatctaatctcacgttgatcgacacctagattgtttctaatttttccacatctgtgaaagtgtttctgtagcctaaattactaaatgcagaattgctgtgcagaggttgtgcgttagaaattataataggtattgtcaaatcagcctcaaagtagctgagctaagctgacgtccccaaggtagtgcataaagggtccaatttacctttagagaaattatcaatcttctaattttgtccaatattatgtatggaaattctcaatgtcgcgtgatttttttctttccctgattatgggtgaagttgtacattttctatatgtggattggccttttggatttcatttatgatgaatgtggagaaatttttgttcatctcctgttgaattctcttttacatcttaacttttggagtgactcatttattacgtgtattaataatccatttatatatgttgaaaatatattctcccaggttatgacttatctttttctttaccatgtttaagatgtcttatgtcatataaaaatgttttcattgttaagtcaaacctgtcattacttcttactttatggtttctgattttggtgtcttgtaaacctctaagatcacaggtgtcttgtaaacctctttttactttatggtttctggttttgtgtcttgaaacctctaagattacagaaagagttttaataattttactattttggttttgactttgagatttttagcccacctagaatttagagaagtgagtaatgtgtaaagtaacttttaaaaataattaccatctaattgtcttaacattgctaattatgagtgtgtgatttctcctctcttcaatgatttgaagtgcccctattacatcctaggcttctatacatacttcgttattttctttattgttttctcttccatttggctgtcactacattccttattatttttctagcgaatggagcaagtctctcatctctggtttgttataatttagaatcagtttgccaaggccaggcacagtggctcatgcctataatcccagcactttgggaggctgaggcaggcagatcccttgaagttggacgttcaagaccagcctggccaacacggtgaaaccccatgtctactaaaaatacgaaaaattagccgggtttggtggtgtgcacctgtaatcccagctacttgggatgctgaagtgggagaactgcttgaacccaggaggcaaagtttgcagtgagccgagatcacgccactgcactccagcctgggcaacagagtgagactccaactcaaaaataaaaataaaaatcagtttgccaagcccattaaattcctttttggaattttcatgttgattgcattgaatttagagatgatctgagggacattgaccactggaagtaaagacaatagtgagagcctcctgtgtgaggctttgacaggaggacactaacgtgcccccttgactctgtcatcgcctttggtttctggcagactttcagtgatgccaacgtttccgccactgcttcatttgccagggtttgtttgttcatttaaccagaaatgtcttgtttattattaaatatttaggagtgtctgtcaagatcagcttatccttttttcccttttaatccgttcatctgtttgtttgaatcataaataggtttcttaagggttctccttccatgtatggagtaccctctacttggccatgatgtcttcttcttttaaaagtctttgtcaggttgacctatgaaattgtttttgtctggagtgaatttgtattttgcttttcccccctagtttttatccctgccattcaatttcttcataagcttgggaatgtttatccctgccattcaatttcttcatgagcttgggaatgtaatatgtgcatgtttattttgagtaagaaggtgtttggtttttctcttctcttttctctctcttcctttctctgtccctcccatcccttctctgtcatcctcctgtccccatgcttactcttcattcttagtgatttttaatctttatgtttttagggatttaaaatgtattgaacttatattttctgggtcgggcacagtggctcacgcctgtaatcccagcactttgggaggccaaggtgggcagatcacttgaggccaggagttgagaccaacctggccaacatggtgaaacccagcctctactaaagatacaaaaactagccaggcgtggtggtgcatgcctgtagtcccagctacttgggaggctaagtcacaagagtcgcttgaaccccggaggcagagattgcagtgagccgagatcatgccattgcactccagcctgggtgatggggtgagattctgtctcaaaaaaaaaaaatagtattttttttaaagaaaccatatttgctgccagcatttgggtttatttagcacatatatgatcttccaaaacaagaggagatctttagcaagttttcagttctcttccattctccaccccagcctcacagcaaactcccacattaaaatcatctgagttttagttcaatattcttctttaacttatctgtaagtgttacaggtttatttacctcagtatttcagctttcttggatttttttttcctgaaatataacctagagtaatttctttcagaaaagatctgaaaaactttctttgtccttacatactcaaaattttttgtgtcctttaaatgtcaaagaaaacttggcattttgtgattctaggtttaagcataattttcccttggtattttcaagacatctatttaaagttcagagtctcttatgtgaaatctttagccaatctgacccttgttgcattcaaagtatcctatttgttttcttctggaagcatttctgggatcatcctcatattcttgcaagacgaaaagtttaccagtgagaactaggcatggctttattaaaaggaatcttgggagttaaccctgatctctgtcccctactacaaaacctcatcgtagtagcctccccccttgaatacagattccttactgtctttgaaaaatattttaaaaaggagtcttgttctttattgagtggcctcttgtctccttgaaagccctgtgaagctttccccatttgctgttgtatctgtttggctgcacatggaaaatccctaagcaacagaggcttaacaacatagaagtttctttttcccagcatataaaagatgcccagaggtagcagtttcaggctagtatggttgctccagagtgagagtgggaatccagcttcctctctttctgttgcatcatcttcacatatggcttccatcctcaaggtaacctcatggtccaaaatagctgctgaagctccagctatcacctccaagttgcaggctggaagaaggaagaaagacagagggacaaaaatgaacccctcccacctaagtcaactgccattgagcagccttttttggaagacatacacaatgtttctattctcatctccttggatcacgtttagtcacttgactgcacctagtggcaacggagtataggaaggaaatagacctttttattctgtgtagcaataaactcagctaaaaccttggcttctgttgccaggaggaaagggacacggtcttccattgtctttcagactaggtagctgacattgtctgccatacctgctcttaattctctccaccccctgcttctgaatgctggaatttttgaatttctttcccaaacctaaagttttctctaagacttttcatctccttgactatttgctctattttatatatctatctttttcatttgtggtatccattctgtggtttggcccactattgattgttgttgtttttttgtttgtttgtttttttgagacagagtctcaggctggagtgccatggcaacggtctcagctcactgcaacctccacctcccaggttcaagcaattctcctgcctcagcctccagaatagttgggattacagacgtgcgccaccatggccagctatttttttttttttttgcgtttttagtaaagacggggttctaccacgttggccaggctggtctcaaactcctgacctcaagtgatctgcccaccttggcctcccaaagtgctgggattacaggcatgagccaccgcgcccaggctttgattgatttttttttaaattatggatctcatatcttcaaattccaagaactctgttctttgcatagaagtgtcttcttttaaatggctatgattctcaaatctccctgaggatgctgatttagatgtcttaatgtactcttttatttttgctgtatctgtacatgtctgtagaagtgtctgctgggttagcatatgtcagaatagatgtgcgctgttttgacatttgggaaactgaatcactattggcatagaggtcagggacagagtctagaggcagcccactgcgggctcgaatctcaacctgttccttaccaaccgtgtgactgtcgaccaattacataacatcccacccctgttttctcatctacaaagtggagcttctagtggtaacctatacatagatgtattcatatccgtaaaaccttttgaataatgcctggctcatggaaaacactgcaatattgtcagccactatcatgaattctctctgtgtatgtgagtactgtttgtgctctttgatgatattgatttgttttaaccttttaaagtaaaagacactaacctgtcctccataattctggttggtatggtctatatgttgaagtgcacccaagtttatgttgcaacctaagccccaatgtgagaatatctggaggtagtgcctgtggcaccctataaaataccccagcgagctcccttgcttattccatgtgagattatagggagaagactgcaaggaacaggccctcaccagatagtgaatctgcccgcaccttgatcttgaacttcccagcctccagaactatgagaaataaactttgttactagtaagccactccatctatggtatgttgttacagtagcctaacggatgagtacattggtgcaaagattttctgtttgcactccgtcctttccttttatggttcagtcagtttgacaaattacagaagatttcacttttatgtacttctgccagcctttgtctctgtgatgtctcctatgcttttaagcttaaagagttcaaaggcattcactcctctggtttgcagctttcataggatgtaacattttacatttaaatttataattaacttgttatttggggaatggtgtaaaatggggttttagataggcatttttatgttgttaatcaatgattttagcatttttttaaatttaatatttcatcgcttcacattgattcctgattccttctcagtctggggtcaagtagagtttgtttccagccagcatgtccattgatagattctgtgtgtgtgtatgtgtgtctgtgcatgtatctgtatgtgtgtgtgtatgtctgtgtgtaggtggtatatgcgagtgtgtatgtgtgtgtgtgttgtgcatgtatgtgtatgtgtgtctgtgtatgtgtgcctctgtgtgtgaatttctgtgtatgtgtgaatgtgtgtgcatgtttgtgtgtatatgtgtatatatgtgtatatacatgtatgtatctgtgttgttcatgtgtgtatgtgtgtctgtgtctctgtgtgtgtgtttgtatgtgtgtgtgcatgtttgtgtgtgtatatgtgtgtatattgtatgtatctgtgtgtgtctgtgtctgcctctgtgtgtgtgtctgtgtgtgcatttgtgtgtatacatgtgggtatgtgtgtgcatgttttgtgtgtacgtgtatatatgtatgtatctgtgtgtgtctgtgtgttgtgcgtgtgtgtgcctgcgtgtgtccgtgtgcttgtgtgtgtgtgtgtgtttgcatgggcatcttgagtgaagcttccaacaatctaacagaagaaaaggagccacacttgtctgttctgctctcttgggtacttcccagaccagtgaaatgaaagggaggaaacccccggcctccgaggagaaaagggaactggcaagcagagggtggggggatgacggtaaaaggagcaggggtggggagagcacaggccctgtggaagtgaggacatgtgtgtgtacatgtgttcatgtccaggggatgacactgtggcatccaacagccgtggaccagcagcccacggggagcttagtaggagtcaaatcctaggcccccgtctcagctgctctgctgtctagcgcattgtgcagtggtaggtgtcagtgatccaagtggggacccagtccctcaggccacacagcgcatgtccattgccttcatgccgcaggagactgaggggtcatgcatgagggccacttctctgggttgtccccacaacacgggcggtgtccctgggacacgtggaaggggaggggcagctcactgctgacatctccttctgcaggcctggaggaggcagaggccaggagggagaggtcccaagagcctgtgaaatgggtctggcctggctcccagctgggcaggaacacaggacttcaggacactaaggaccctgtcatgcccatggccagcacccaccagtgctggtgcctgcctgtccagagctgaccagggagatggtgctggcccaggggctgctctccatggccctgctggccctgtgctgggagcgcagcctggcaggggcagaaggtgagtcccgtggctcccacccacttccctgtccctgtcctcactgctgcaccctgggggagggccgcagcgtatcctcaggatcctgcccgccagccctcctcctgctcccctccctctgtctctccccctggccttccctgggcctcccccgcttccctcctcctgcacattcctgctcatcctgtcttggaaagtccagctgagcgtgtctggcttccttgcccacatttctcagggcggcactcccggcccctaggctccaggatggctgctctggccgtttccctgcccctccttccccagcagacactctctgtgcctcagtggttcccacctccgggactttgctcctgcagggccttggctggggttctctccctgcttcagccgctagcaccctccttgtgcctgaagcccgcactgggatgctcctgggctcttgaggtgaaatggcccctcccaagggctcccagagacctggcttctgtgataatgctgggaccacagtccccttaacaaataccaggctcctgaggacggggactagagaggaggtgggaggttgcagggtagaactctgccacgctgcatcccagggctgagtgtgtgccccctcccaggctgcacagtcggtccaggggccaggcctgtgcttgatgcatgtccctgtcctggggtggggggaggggaccgtgcccaggaacagcacactgcggaggcccagaaaccatgctgagaaccaacagaatgtcttgcttctgccaggagaggagggtccgcaaccaggagcccaccccggcagacatgaacacatgtacatgtgcctggccacctggtgcctctgcagggacctgggagacccctccccagagcgggacatcccaaagcagctgggggtgatggtgacaagggtccctgcaggaaagagaggtgacccccttctacccctcttgtcagaaaccatcccgctgcagaccctgcgctgctacaacgactacaccagccacatcacctgcaggtgggcagacacccaggatgcccagcggctcgtcaacgtgaccctcattcgccgggtgaatgagtgagtgatgctgggggcaggggccacgggcaggggctacgacgtcccctgtgcctggcatggggcgacagtgtagagagggacctgtcaggtcagcctcggggtgggagtggacagaggacagaggaggagggaggccctgcaagagctcctgctccgccaggcacctgcgaggccgggtgctgccgtctgacctggggtttctgcggagtgcctcctacactgatgttggtgacaatggtggtggtggcaatggtgaaaatcttctcttgtttcatcacaatttaacacaattgccccacatgacctatcttagttcctcctcactgtgaggtgggcagggccaggccacgaagccccagctgtgccactgcctgcctgtccagagtagaccaaggagagatggcgctagcctgggagttcacagatgggaaaactgaggccctggaggtgaggtgccagccctggccacggggtagacagtggcagagcaagctgtgtggacgtgtctgggagggggctccgcgctctcccagggcccccctccgtatgtgggctgccacctctcccacccaagctctcctgggcacgtgccacaagggaaggggaccagaatcgctctggggtgttggccagggtctaaatcagccataaattaagtaattaaatagctggaaccagagaggcagatgacaacccattggaggtcaccccagcgttggggggcggggccggctctgccacccccacccctccaccgccttcagttctccagggcgtctctgtcggaccttctccattctcctcaaagaccatcctgcccctccctgtgacctgcttcctgctgctctgacacaacaggggaccagggagaagctccccacccaccccacactcacactccccaccccctttgcccaccgccggggcctgggcctggaccagggctcctgtctgaggcctgagacacgatgctgtctggtcctgttgctcaggaacatcacggcccccaagtccccactctgccctgtgccacccaccatgccctctcccaggatctttcccaattgccttgcaaacctgccccaaccccctctcagatgcccacaggagtgcagcgcctgggcatctcctgacctggcaaccctgcggcccctctttctctgcttcctttgacagcagcattccctaaagagttgtccacattcaccacgtccagtgtctttccagccatttcctcctgggcccactcccctaggatgctgcccccaccaggccacccaaactgctctggtccaagtcagcaaatgtcccagggagcaggatctcatggttgggcctccgccttcttcctacttgaccaggggcagcccctgacaaggaggaccaccgcggcctccctgcagtttctcttgcacctgactctgcccacagctcacccagtgcccccggggccctgcccatcctcctctttctccttgtctgctgcctcctgatggcaagacacccaggcccagtccatggacctcctctctgctgtatccactctgcagagaccccctcaggcccctggggcatctcccaaaggtgacctcaagcccacaattcccctaagctccagccctccaggcgtactggcctctccacctgtcacttagacaacaggtgtctccgactccaaacgtcctcaaccaaagtcccgctctcacccgagctgcgctgctgcctctgtcttccccatctccctttctaaatgggagctcctagtggctcaaactaaacaacagggaggattttgttttgtttttaagtctcttttgtcaccattccttcctgactgctacatccctccaccagcaaatgctgccaaccttatctcaagcagaacatgaatctcacccacgccagcctgaccaccctgttgcacgccacttcctgtcacctgaatattccagaagcctcgtaactgggctccctgcttccaacattgccacattcccacctcagtctattcgcaaccgaggaccctcaggaatcctttcaaagcatttatcaaaatctacaacacctctgctcatgactgtttcccactcactcgcagtgagatccaatcccatcatgtagatggatgggtctcctagacctccctatcacacgctctactccctgcgcactggttttaggccaagccacgcagcacaccaaactctgcctgtcccagggcctttgcacgtgctgttcccatttcctgaaatcctcacaatttgcacagtccctccctcaatgcctttaacattctgcccccaggtcacctccttagagaagcctgcttgtcccatatttcaaattgcctccctggcccagcccttcctccctcctcacctgcttcttgctttatttttccacatgaagttctctccactgcacacgctacacactttgttccatgcgggtccccttctcccaggatggcagctccgtgggcaggatttttgtgtgttttatcactgctggcccctgattctgaacagagccaggcatgtggtgagcactcgaggaacctttcgtgagtcagtgatacccatacaccctgggctaagccgtgtcctctcccaacagggacctcctggagccagtgtcctgtgacctcagtgatgacatgccctggtcagcctgcccccatccccgctgcgtgcccaggagatgtgtcattccctgccagagttttgtcgtcactgacgttgactacttctcattccaaccagacaggcctctgggcacccggctcaccgtcactctgacccagcatggtgaggggctgggggccctgcccggggcttggtttcctgtgtggacagcgggggcaccaggggtggtccagggagtcttcaaggcagaaggctgtggcttggggttgggtgagggtttcttgagggatgagggtatggtctggttacatggagacttcagagcagaggggcccctgacaaaggcttctcctgtgcccctggctgctaccacctcccactaagccatgggcttccagcactgcaggcttgtcttgaagaaaaccgttctcaccactcacttagaaacctaccaagttagaaaactctgtccgcttagttgtttcatctcatctctgaagcaacccatttcctggatgtggcccttgaggcccaggaggtcagatgcctcctctgaagtcccacagctgagcagtaatgacagagatggggtcagccttcccgggggcttcctgcatggtagacagggagcttgtctcctcgctgccctggaggaggggccccggtgtgggccgaaatcccacagtggtccatgaagccatctgtggtctagggtggggtagatgattattttatgtagttaggttttatttgcctctatattagaaagaaatataacctgcacttcgaagtcctggattcaaggaaatggttgcttagaatgaagctaaacctgaaaagggacacgttttatgaaagttttcgttgacgtggcaaaaacccatgctggtggcaggctggtaggaggtactgcaggctgtcattgggagtctcagaaccacggcaggcttggtgctgttattggtgcctttggctgctgctgaaacggagacagagggaggtgactagtccaaggcctctctactgctgctggcagagctgagatccagtgcaggatggtctgagtccccggtcctaaccaccgaaccacctggtgctctttgcaagggtcacacggaaggggctctgaccatggcttcctgcccttttttgccacaacatcataaagccactgccagaggaggggatcagttaggccaccaggagtccatcagaagcaacatttccacacatgggtttgatggacacgagagtcccttccttcccgaatggagctcagggggcccaggctggagggaggggaaacactgtatgccgtccaccgtgagaacttactgacagtggcgggtgggtgcctcatgcagggggtaaagggcagggcccctgggagatcagaacaggcttcccagagggaagagctttgcaactcagatctgaagggtagacaggaggggagggcagtaagagcctctctggcagggtaacagctgtgcagaggctgggggatcagaagggcatgggcagctggggaacctgctcaccattgtgtccagggagcatcagcttcaagggctggacagcggtgggaagaagcaggagacacaggtaaggacctgtccctggagaggcttctgtctcctgcagtctcaggtagaggggaccctctaggcatggagagcactgaggggaaatgacatgatcagatgtggatgtgagaatgctggggacaggggacttacagggtagattggaggagcattagttgggaaagaagttgaaattcaggctgtggcctaaagcactcattcctagaaatgatgaggacacaactggctaggagatggggacatgagggcatgcaaatcatagttcagatatacacacaattcattcattcaaccttctttccttgagcgcctacataagccaacgaagcagtcaacaaaccagccagcaaccctgcccttggagcttacagcctggaaacaaggaaggtttctaaggcgatggagacaacttagatatagggagagaagtgtggcccttggcctcctggagcctgtgttgagtagcgaggtagggtccagcctaatgcagattagcaatgaatcaaggatgctgggaggtactgggcaggcgacaggcatgcatctgatctgctctgagtctccatgtttggagaccttggacattttacttcctctatgagtttctccgtctgtgaaatgagctggtggactcaagaggtttctcttgagttggctgagcaggtttctgatggggctcccagtctgcgcagtttgtggcagcttccgagagggctctgccgggaagagctccccctccatgacagcctcgggggctgggagtgcagtgacccatgagggacgcctgtcctggctgtgggtgaggaggggcggttcccctgctgtgtgtctgccgttctgggttgatggttcctgacatgctctagcatgccataacccatgtccagcagagagcacttacatcctatgtgtgaggatgttttcgtttgaaagccatccctcagcaagcagacaccagaaaccagaaatcaggtgccgtgtcttcattctgcattttcttgaacaacccagagttcccaggagatagatgcttgccttgtggctgcaaggatttcatgagaagccccaaagttgcttacgcgtatttgttcattcattcactcattcaccttgccccataattcactgagaagccgcatctcagcctggaggtagggaagggggtcaggaccaatcccacccacccccatctcctcacaccttaggggaggcagacacagaagcataggaatccctcagctgtggtaaggccctggtggagggaattccactgagctatggtgaaatgagagaaggaatgagggattccgcctggagatgcagatccgaggatgttcctagagccggaggcatttgcccggggcactgacaacaggaaggaccctgggcaggaggaagggagcttggacagcaggaggggggaggccgctgaaccgcaggcccctctgctagcaggagccacccaggccgcagcgtgggcagtggggagcctcaggacagaggaggctccaatgagtttcctcgccagcgctttttatggagttcgggtcacgtgcgcattgcaatctgcacggctttccattgctttcatgttgaaaccctacagttttgcagatgaagggctgaggctcacagaggagacgggtcttgctcaaggtccctcagctgctgggggcaggggtggcctggaaccccctgtgtccacacaaaaggccatgcaggccctgactgccccccagcggtccagcccttaggtgcccttcacttcctcccctccagtccagcctcctgagcccagggacctgcagatcagcaccgaccaggaccacttcctgctgacctggagtgtggcccttgggagtccccagagccactggttgtccccaggggatctggagtttgaggtggtctacaagcggcttcaggactcttgggaggtaggaaccacggccagctctgccccagcccgaagggatgggcagcacccctcctccagcacccactgtctcctgacaggacgcagccatcctcctctccaacacctcccaggccaccctggggccagagcacctcatgcccagcagcacctacgtggcccgagtacggacccgcctggccccaggttctcggctctcaggacgtcccagcaagtggagcccagaggtttgctgggactcccagccaggtaatgttgccagagcccaggaaatgccccgtggtgggagggcaggctcatcaggagctcctggcacagcagggttcctgggctccacctgggggcttcccagatctcctgctgccatctttccagtagcgtccctgggccgtcccacctctactgtgaccactgaccagtaggactctgcatctgttcactttgggtttccagttttctgcacgttctctgccaatggcaattacaataataacaacaacagtgctattagcagctgtgtgttaatggaggctacaggatgctcagggcttacccacatttttcagttcaatccccaaacactgaaacttagatactatttccattctcccgggagggcgtgcaggtgcacagaactctctctctctctctcggagctgttggacacacagctggcaggttcaggctgaagtttcagccctggtcttttggccccagagctcatgacctctgtgtgatgaatcacacggtgggcacccactgagagctatgggagggatgaatgacggagtacatgaggacctgtctccaacccaggggatgaggcccagccccagaacctggagtgcttctttgacggggccgccgtgctcagctgctcctgggaggtgaggaaggaggtggccagctcggtctcctttggcctattctacaagcccagcccagatgcagggtgagcatcttttttctccatcccctcccctcctcttggccttgctctctccaagcttcctcctgtccctggggccccagcagaagccacagcccaccctaagctctcctccctcccgtgtgccctccctctccctgccctcagctctgctgtgctcctcagggaggaagagtgctccccagtgctgagggaggggctcggcagcctccacaccaggcaccactgccagattcccgtgcccgaccccgcgacccacggccaatacatcgtctctgttcagccaaggagggcagagaaacacataaagagctcagtgaacagtgagtttgctcctagcccgctgtggggatggtctgggaccagcacaccctcattgtgtaacccgaatcagttcagggttcctcctggccccgtcttcatgtttgtcactttcaaagagatgcagtccagtgaccaaaagtgaacagagaagcaatgaaaccacgacggcagtggccaaaaacaggagcagatctttaaaacctctgatctcttgtccttttcttctgcttccctctcccatcctgcagctctctaaatctccactgctagccacaccctcctggtcctgtcaccaaaaccttccctttcattcctcattggattttcctctttctgatatccgaaattccccaccgactgatattctatctttaatgtaattgatctatgatgtacttttcaactggagcctgtggtgtgtacaaatagtgttgatccttggaggttaacatccctcgtttctgtgatgtaacaaggaccccagtgcaatggaacctctcacgttgtttcatgatgaccaagttcttccatccagtctttagcatatgtgaagggcagaggccaatttgtcttaattacctgggtttgaatttaccattaactctcttgggatcctcactggaaaaaggaattctgattgttcaaaagcacaggatatattaagggcctcatataatgcctggcacataagagacctcagcaaattacgggcattcatattatgtttatacagtgaaggcatcaaggttataagcattctcttttttcttttgggtagactgaagctcagagaggttgagtggcttacttaaagctgcacagctattagtaggcagatcaagattagagttcagaacttctcactccctgcccagtttctgctttctttaccctttgcctctttcaagttgtgggtctgccggccaggtgggaggtgctgtctgcaaagggcttccctttctctttggccactatctggctggggagaggcctcacctagatgttgttgaaggcctgttacagccgctttattggggattttctggcgatgagaacgtgtgaatgtcctggcctttagtcaactccctacacctctgagagtgtcagacaagagagcccatcacactggtgggattgcaatctttgcctctaccactgcttagctgcctttccttagggcaagttacttaatggttctgtgactcagtttccctgtttgtgaaaagtgaaggttaatagtacccaccatatagggctgttagaatggagtggaataattcatgtagaataagtatgtataacagtggctaaaacatagtcaggctgggcgcggtggctcacgcctgtaatcccagcactttgggaggccaaggcatgtggatcacgtgaggtcaggagctcaagaccagcctggccaacatggtgaaaccccgtctccactgaaaatacaaaaattagctgggcttggtggcgggtgcctgtaatcccagctactcgggaggctgaggcaggagaatcacttgaacccaggaggcagaggttgcagttagccaagatcacaccactgcactccagcctgggcaacagagtgagactccgtctcaaaaaaaaaaaaaaaaaatagccagttgcctagaatagaaccaactaacagtggttttatttttactgcaaaaaataaaaataaaaataggagtagtgcaagcactgggccacatcactacaaaacaagtgtatctcagcatctcccacgagaataccactcaggtcaaaacatgatatagtgaagtggggatgaaaaggatccaaccatgggcagaacctggggtctggtgccagtggagacagccccagtgtctagcatgagacacggggaatgttccgttggagggtgggtatgatgactctcctgaaagcttccctccctccagtccagatggcccctccatccctcaacgtgaccaaggatggagacagctacagcctgcgctgggaaacaatgaaaatgcgatacgaacacatagaccacacatttgagatccagtacaggaaagacacggccacgtggaaggtgagggcctttgcccagggacgggagaaacactggggagggcgggagaagggaaagcaaccagaggcattccacctgcaaggcgtcgggcccttggcaggtgaccagtgagaggtagccactgggacgtggtgatcactaggctgtgtggtcagcaggtcactgtcctgtctcttggtgaagtaactgaggtttggaaaagtggcgtggcttggccaacgtgaacagctgaccctgagtccccaggcaacagaagaccctctgggcagggaggggttgaaaggccactgggaagaaggttttcaaaagtcatgaaagtttggggttatttcctcagaggaatctcatctggacacacatggaggctcagacagagctgcttctaatgagtcgggggtgcgcccaggccagggctcggtcccctgcctccacagagcccagaacagaaaccacagaaccaaccccacaccttcagtctagaaatggggcaactgaggctaggagggaggtgggccagtggtggagccaggagcgggccctggggtcctgaacccccattctcagggtccagagtccagtcggcctgcactgcgttcctgaaaaggccacaatatgggtgcaagctgccccagaagggctgggagctgagaaggctcaaaatagggtgggacaggtggcttcagggttctgggcctcagtgttgtcaatgtcaggggctgcactgacaggcggagtccccggtgccatccgaagtgctgtccgtgggtgggccctcagggaggatccacggtggtgagagagaagccgcagcaggcctggggtatggcaggagctaggagccagcgaagccgagggtccaggtgggagggatttgcagctgctcccacgggcaccgggccaggcctcaccctcagtgccaacccacaggacagcaagaccgagaccctccagaacgcccacagcatggccctgccagccctggagccctccaccaggtactgggccagggtgagggtcaggacctcccgcaccggctacaacgggatctggagtgagtggagtgaggcgcgctcctgggacaccgagtcgggtaggtgaaggctggagtccagagcttctggccaggaccagctcatagtttctcactgccagaaaatccccaatgcagcagccgtagcaggcctgcaacaacttgtaggtgagccgtctccccgattagatggtggccaaagagaaagggaaggcctttgcagagagcacctcccacctggtcatcagacccgcaagttgaaagaggcaaagggtaaagcaggcagaaactgggcgtggagtcagaagttctccacccactcttcatgagacagcacagctgggcagaggatgccacatctctgggtgggcacagagatgtggggctccagaccccactccactcaggcctccttccctcccttggaccactagtcgttggaaagtgacacctggtgttcagtacagactgcaagtgaggacttgagggagcagaggagagcaggtctcatgatcgctcctcctttaaactgggacttaggcttctgttaatatggcccttggtttcttagcttttgggactaccaagtttttgtggttgctcagcccgagtttcctgttaccatggaagcaagaaaatctagagccacagactgggtccttggattggaaggttttgctgtgattccttcatcttcccacctccctgcacttgctgcgtgcactgacccctcacctttcaccatagtgaccaccaggcgactcccgcagaacaagacaagtccaaggggtggtttcagagagagtaaggatacaggagatattgggagcaacccaagtccccagccaggcttggtagcggcaggggcccagggagagggccacaaccaggtagaaaggaggccggaccaatgggcccaagagaggaggaagaggggagtcctggaggaacctggcctgggagctcagggctgggcagcaggtgggatcaggggcctctggaggggcctttgctcctgctggtgcctctgccactatgcctttccccatctccacctctaatccttcctattactggaggcccagctaatatgccacctccttcaggaagtcccctgtgattgccatgaacagtggttcttgccctccctgtagcacctcctgtgctatagatcctggaaaggatctgaccctcctgtgtcctcccagcactttgaacactgtgggggttcagaccaatgcccttcccagcatggatctggcctctctcccctaatcccccaaggcagtaagttccagagccctgggcctgcacagagcggggtcttaaggaatactgcaccaaccccactccctgccctgaggtcgatttcccgcccagatgctgacattcctctttctccccggctgctggaagtgctgcctatgtgggtgctggccctcatcgtgatcttcctcaccatcgctgtgctcctggccctccgcttctgtggcatctacgggtacaggtgaggggactctgtggggctggaggtggcagccgagaccccagagggcactggggaatcccacccagctccctccaggccctgctctgccgctcccttcctgggcctcagtttcccctctgggcatgagcatgggagcagctggccatgaggtctctgatggctgtcacctccgtggtgtcttccaggctgcgcagaaagtgggaggagaagatccccaaccccagcaagagccacctgttccaggtaggaactggctgcgaggggcggagtgggggcttctctgttcctgcctctcttgtctctgtccccacctcctccttcccttcctgtgggctttgggtggtagggatgtaggtggactgggctttgggagctttgggagtggggccagcacttggaaattcattcccgggattccctggagtgcccacacctggccctgcctgccagagctctgcatggagcccagtggagagaactgagtgtggggatgcctgggacagggtgggctcacagagggggttcctgctaccaggatggatggggtgtcaggaggcagaagggctccccaaggacaagatacctgggctgagctttgagggtcccagtggtgccaggtggcaaaagttgctctggctcagggcatcttgagggtggagacagaaacccttcaggaagggagctgaaggggtgggacaggaggctgggggccatgttgggaggctgagatgaccatggggaagacaccagcgtgtgggtgatgggagccctatagtcaggcaggcagggccagctttgcctgtggaggggtctcttggctggtgtggaggagaaatgggggtgagcatggagacaggcactccaggttagaaaaatcacaggaaaagggccctgtcctcaggtagcagggacatgggggaagtccccgcccctctctgggcctcactttgctggtgtcaaaaggccgtggccagtcctgaagaagtggagattcttctcttgtctgggggctccttgaatcctcctgcacccccgtcaccctctgccttgcccccacctcggacctcctgatgctcaccggcccaaatgtctctgctcttgcagaacgggagcgcagagctttggcccccaggcagcatgtcggccttcactagcgggagtcccccacaccaggggccgtggggcagccgcttccctgagctggaggggtgagtgggctcgtggatcactcctgacctttggggttcatacggggggctgactccattgtggaaatcagggactcaagtgaggctgcctgtggctcactgtgaagggatccaagggagctggtttgcactaaagcaggaggcacctgggggggatgtgaggaagaacttcctctttccaggtaaggaagtgccagacaaggggagtgaccggaagtgaaagagggaaacagttggccttcccctccctggctgcctcagaggcgtcacactgcagaggcctcatggggtagctggggctgcagactcccgggaactcggcgcctgagccggcagctgaccaccaactcggcagggagaagggggtggcatggttgatagaatgatggaagggttgcccagtgcacaggctgggcatgagcctggtgctgaaggaggatggactttaaggtcaaaagggagagggtaccagccttgcagaggaagaccttgagctcagcatggaggatggagctcctgagccacggaaagactgaatccatgtcccatgtccttctctggggcccctgctccctcaaccctgtcccgttcaggttctctctgtgagatctgggggacatcagggcttccagagaaccatctccaccccaccaagacccttgtgcctgacccggatcatctgcccagggtggtcccaactcttctgcccattttcttcccacagggtgttccctgtaggattcggggacagcgaggtgtcacctctcaccatagaggaccccaagcatgtctgtgatccaccatctgggcctgacacgactccagctgcctcagatctacccacagagcagccccccagcccccagccaggcccgcctgccgcctcccacacacctgagaaacaggcttccagctttgacttcaatgggccctacctggggccgccccacagccgctccctacctgacatcctgggccagccggagcccccacaggagggtgggagccagaagtccccacctccagggtccctggagtacctgtgtctgcctgctggggggcaggtgcaactggtccctctggcccaggcgatgggaccgggacaggccgtggaagtggagagaaggccgagccagggggctgcagggagtccctccctggagtccgggggaggccctgcccctcctgctcttgggccaagggtgggaggacaggaccaaaaggacagccctgtggctatacccatgagctctggggacactgaggaccctggagtggcctctggttatgtctcctctgcagacctggtattcaccccaaactcaggggcctcgtctgtctccctagttccctctctgggcctcccctcagaccagacccccagcttatgtcctgggctggccagtggaccccctggagccccaggccctgtgaagtcagggtttgagggctatgtggagctccctccaattgagggccggtcccccaggtcaccaaggaacaatcctgtcccccctgaggccaaaagccctgtcctgaacccaggggaacgcccggcagatgtgtccccaacatccccacagcccgagggcctccttgtcctgcagcaagtgggcgactattgcttcctccccggcctggggcccggccctctctcgctccggagtaaaccttcttccccgggacccggtcctgagatcaagaacctagaccaggcttttcaagtcaagaagcccccaggccaggctgtgccccaggtgcccgtcattcagctcttcaaagccctgaagcagcaggactacctgtctctgcccccttgggaggtcaacaagcctggggaggtgtgttgagacccccaggcctagacaggcaaggggatggagagggcttgccttccctcccgcctgaccttcctcagtcatttctgcaaagccaaggggcagcctcctgtcaaggtagctagaggcctgggaaaggagatagccttgctccggcccccttgaccttcagcaaatcacttctctccctgcgctcacacagacacacacacacacacgtacatgcacacatttttcctgtcaggttaacttatttgtaggttctgcattattagaactttctagatatactcattccatctccccctcatttttttaatcaggtttccttgcttttgccatttttcttccttcttttttcactgatttattatgagagtggggctgaggtctgagctgagccttatcagactgagatgcagctggttgtgttgaggacttgtgtgggctgcctgtccccggcagtcgctgatgcacatgacatgattctcatctgggtgcagaggtgggaggcaccaggtgggcacccgtgggggttagggcttggaagagtggcacaggactgggcacgctcagtgaggctcagggaattcagactagcctcgattgtcactccgagaaatgggcatggtattgggggtcgggggggcggtgcaagggacgcacatgagagactgtttgggagcttctggggagccctgctagttgtctcagtgatgtctgtgggacctccagtcccttgagaccccacgtcatgtagagaagttaacggcccaagtggtgggcaggctggcgggacctggggaacatcaggagaggagtccagagcccacgtctactgcggaaaagtcaggggaaactgccaaacaaaggaaaatgccccaaaggcatatatgctttagggcctttggtccaaatggcccgggtggccactcttccagatagaccaggcaactctccctcccaccggccacagatgaggggctgctgatctatgcctgggcctgcaccagggattatggttcttttaaatctttgcctttcagatacaggaaaaataatggcattaaattgctttaatttgcattattttagttatccagtttgcacatatttttataggtatcttaggcatcgattggtattttttaactgggccaagcccattaaggtctttcttctgttgggtgctatcattttctgattaagtctttttgactattgacatacagtctttcacagatggtggagtgtttttcccccaaatctgttgtttgtcttataatgttgtatatgaggttttatggtgtatgaatatgaatgcttctgtaatgtcaaacagatccctagtaaactccttcttcacttttactgtcagatttacaaaggtcctcccattgcaaagcagtgtttgtcctaatttatatattgtttttctagttcattttgtgtttccaacttttcatgtaaaattttaattatttttgaatgtgtggatgtgagactgaggtgccttttggtactgaaattctttttccatgtacctgaagtgttacttttgtgatataggaaatccttgtatatatactttattggtccctaggcttcctattttgttaccttgctttctctatggcatccaccattttgattgttctacttttatgatatgttttcataagtggttaagcaagtattctcgttacttttgctcttaaatccctattcattacagcaatgttggtggtcaaagaaaatgataaacaacttgaatgttcaatggtcctgaaatacataacaacattttagtacattgtaaagtagaatcctctgttcataatgaacaagatgaaccaatgtggattagaaagaagtccgagatattaattccaaaatatccagacattgttaaagggaaaaaattgcaataaaatatttgtaacataaaacaaagtgaaaccctgaatttgtgtgtgcatgttggtgtagttggaggaaggggttgctctttgaaacctcaattgctattgtaagtgatacagctccagtgactggaggaacaccagggtccttagtcttgcgccgatttaaataaaacgacacggaaacacatggagtggttttaaggagtggagagtttaataggcaagaaagaaggaagaagctcccctgtacagagacagagggaggggggatccaaagctgagagaggaaaccctgagtgccacagaaataagccagttatatgaggaggctagagaaggcagtatctgatttgcatagggctcaggggattggtttgaccaggcatgtcattcatgtaacccctgaaaaacctggccctttcaccctagcattttaatatgcaaatgcagggcgccatgatgttctacacaggtgggactatgtgggggtggccatattgccaggcaaacatggggacaaggaaaagatggcgggaatccccatgtttgggtggacccagtttctaacggtctgcatttgcatatcaaaggttgccagcctgattctaagagccggggctttcctgctagacaagaaacgttttttggagctgcttttaaaacagaaacgaaaacttcccaaggaccacttttcctctttatctgcctcaaataattttttaataattcctataacacaaggaaatgaattctgccaaacagaagggcctttggtctttggggcactacagtgggtacatgatggcgtgtggaacaccacgcaatggagggagacgcagggcactcctgggaaaatccaggagggatgagggaagaggaaagacagtgagggaaaggaggataaagaacacacttttaaaaaatcgttcattattatctgaaattccaacacaactgaacgtcctgtatttttccctagtcatgagagtgaaaaactaaatagagactgagttccccatacaaataactgagagtgatcgagagcttattcctggcaggccccattcgagtgacctctaagatcaattcatttagatactatggaagtggaagatactatctttatcatttttgtcattgaggaaactaaggcacagagatgtcatacaacttgccccaggtctgccagcaggtaaggggcagagccaagatttgaactgtagccctgtgtctcagagcctgccctcaaaaggtaagtctctcacctaaagatccatacggagatgtaagatgatccatgttggttggcaagacagaaaaatccataaaccaaataaattgatttggtggcagggggagattgaatcagaggtgaccctgaaaagtgtctgtttatctgggagctgaacactgaaggtgcaattctcacccattggagtccagagagaccttccctggaggactgcagctccctcatctgtcttcccctgagaacccagcccagagccatgcatgtagtaggtgatcattgaggtgagcaaggcctgcaggaggctgtccctaagatggaggagaacaaaaaacttattagggggatgaaagggagggcaggaagcagaagtgggctagggaagccattggccatccagagttgacatttgtccccccatggggaacttgggggatgaattgcctgttggaagagcccatgttgggtggaaatggccagtcccggagcccttcatggtggggaaccctgagaacacactacataaggaaggagcagggctggagaccatcagcagcttgggcctcacaagcatttcacatgtttaattgatcacacagaacccttgcaccaagacaatcgtttgctcctagagggagcctttccttcgtttggaaacaatcctttcccaaccccaacaaggcaacctgcatccggtggtgctcaatcaatagaagctgggcagcccgggtgcagggtcagtgtgcccaaagcattgaaatgcggtgatttgggccatgggtcatgctgggtgtcctgagcaggggtaacttcatctacccagtgacgcaggtagcaactctctgggtctggtggcacaggaggtaaaggaatttaccaagccagttgtaggtaaagaaaggcagatttattagagaaggtatgaaaatacgttgcaaggtcgcaattacaatgagcagagaaggggctgtctgcaaagaggcagtggctgaagggaagtttcatagagtcacgttgaagagggctacatgcagaacaagcagaacgaggttgttgtgcctggttgtttgtgattagctgtctctcagaacaattgatgacttttctccccacttggggccctccccaacctggggcctcttcctcattgttgcttatttatcaggactccaccagggacagagtcaccctacaagtcctaactcaagtgtgggttcttcttagaacacagcccctccagctcccttggaaatccccaagtcttcccaaacgatgtaggacttttcttcttggtcactttgcaagccggggcccccagtcagtgatgccttgcccaggtctcactcggccacgctatcgcgtataacttgtataacttgtacccatgttcagtggttcctgagcccttgtacctcgcccaagaagaatgaagatatactggacattggagggtgaggagggctgagaataattttattgagtgatgaagatggctttccgtggaaaggggattcaggggtgggaggtggggtgtagggggaggttttgccacgtggctcggtctggggccctttatggattcaaaatgaggagtgtatgctgattggtttgtgagtatgcaaaaaaggttaaagtgacaacaccactcaaagctgtgcacaatggtgtaagaaaaccaattaggaaagggtagggaggtatatgtaaaataggtgaagggtgaggactaatcagaggtaagcatgccaaacagaaagacaagttctcaatccagtccagtcggatgatttaacttgtagcttggctttcaggctttaaactgtctttggcttggaggtggggtttcacggaggacctgccccatctgcataggcatttgtccacctcctgcttctatcacagagcatgtctcagcctctctgtcctgccactcaactttgtccccctgcctttattacccatcttgtaattcctggctcacagctttgtgttccaactagactgagagctccctgagcccagctactgccaggctcacttcaggcttcaatgcccagctcagacgcagtgcatctgctagtgtgtgtgtgtgtgtgtgtgtgtgtgtgtgtgtgtgtgtgttaaaagtgtttcttgctggctggttctggaaatttgtcattctctgtcctctatcttcctgttaaaaacttcagctgaattaaatttaaaggagtttaattgagcaataaacaattcgtgaattgggcagcccccagaatcacagcagattcagaaagactccaggggtgcctcatgggcagaacaaatttatagacaaaaaaaaaagtgacatacagaaatcagaactgaggtacagaaacagctggattggttacagattggcgattgccttatttgaacacagtttgaacgctcagcagcgtatgagttgttgaagtttatctgctgggattggccaaaactcagtgattgttacagatgcatactcctaagttaggttttcaatcctgtctacctattaagttaggttgtagttcatccacaaggactcaaatatggaagtacagagtccttctcaggccatatttagtttgctttgacatccccattgagatgactcaactattcggctaagggctgtagacagtgaagaaatgtgactaattgctggatactgtagtatattgagtgtgcaagagcattatatctaaaaaacaatgtacatactgcaatttaaaatgctttgctgctaaaaaaaaataatgctaacagtcatgtgagccttcaagttgtcatctttttgctgctgggggttcttgccatgatgttgatagctgctgactgagcggagtggtggttgttgaaggctggggttgtgttgaaggctgtggcaattttgtgattggccaccaatggagtttgctgcatcaatggactcatcctttcatgaaatttttattggtagcatgcaatgttatttgatagcatttctttccaaattgaagttaatcttcttaaaccctgctgctgctttgtcaactaagttgatttaatattcttcatcctttgttgttatttcaacatgttcacagcatctttaccaggagtagattctatctcaagaaaccactttctttgctcctctgtaagaagcagctcctcacctgttcaagttttatcatgagattgcagcaattcagtcacatcttcaggccgtacttctaattctagttttctttctatttccactacatctgcagttccttcctcccctgaagtcttgaatccctcaaagtcatccataagagttgtaattgacatcttccaaaccctgttagtgttgatgttttgacctccttccatgaatcgcaaatgttctgaatgatatctagagtagtgaaccctttctagaaggttttcaatttacttggctcagatccatcagaagaatcactgtctatgacagctatagccttaggaaatgtgtttcttaaataacaagtcttgaaagcaggaatttctccttgatccaagggctgcataataactgttatgttcacagacatgaaaacgacattaatcttgtgtatcttcatcagagctcttgggtgaccaggtacattggcaataagcagtaatatattgaaagaaatatattttctgagcattatatctcaacagtgaacttaaaatattcctaaaccatgctgtaaacagatgtgctgtcagcctttactgatccatttccaaaacacaggcagagtagatttagcataatttttgtattagtctgttttcatgctgctgataaagacatacccaagtctgggcaatttacaaaagaaagaggtttaattggacttgcagttccacgtggctggggaagcctcacaatcatggtggagggcaaggaggagcaagtcccatcttacatggatggcagcaggcaaagagagaatgaggaaggcgcaaaagcagaaacccctgataaaaccatcagatcttgtgagacttattcactaccaagagaatagtatggaggaaactgtccccatgattcgattatctcccactaggtccctcccacaacacatgggaattatgggagtataattcaagatgagatttgggtggggacacagagccaaactgtatcttttttttttttttttttttgagatggagtctcactctgtcacccagtgccacgatctcggctcactgcaagctccacctcctgggttcaccccattctcctgcctcagcctcccgagtagctgggactacaggtgcccaccaccacgcccagctaatgttttgtatttttaatagagacggggtttcacggtgttagccaggatggtctcgatctcctgaactcgtgatccacctgcctcggcctcccaaagtgctgggatgacaggcgtgagccaacgcacctggccaactgtatcaatacttaaggggcttagggttctttggaattgtaaatgagcattggtttcaatttaaagttaccagtggcattagcccctaacgagagattctgcctgtgctttgaagcattgcagcttcaaataaaaggctattttgtctacattgagtatctgtgtttagtgcagccaccttcactaatcatcctagctggatattctggataactttgtgtagcttctccatcagcacttgctgcttcactttgttcttttatgttacagagatggtttctttccttaaacctcacgaactaatctctgctagcttccaacttttcttttgcagcttcctcacctctctcagccttcagggaattgaggagcattaaggccttgctctggatgaagctttggcttaagggaatgttgtggctggcttggtcttctatccaaaccactaaaatttctccatatcagcaataagactgttttcttttctcattcatgagttcactgaagtagtatttttaagttcctgcaagaatttttcttttgtattcataacttgactattttcccaagaggccaagttttcaggctatctaggctttcagtgaagcttaatcatttctagcttttgatttaaagtaagagatgtgtgcaactcttccttttacttgaaagcttagaggccattgtagggttattaactggcctaatttatttattgttgggtctctgggatgagggaggctagattaggtgtctagttagggcctgcttcctcatagatgaaggcttctcactgtagggtgagagataagagaacggcccgtaggtggagcagtcagagcacacagaacatttgttgattaagtttactgtcttctatgacagatcatggcatcccaaaacaattgcagtaataacatcacagatctcagaccaccatgacagagacaataatcatgaaaaagtttgaaatattgcaagaattaccaaaaggtgacacagagatgaaactgcccctataaactttatgaaatgaatcagggaagaaggaagggggagaaataaaagtcacccacgcttgcagcacatttggcctccatcatgaggtcggcctgctctccagcctgcgtcctcacagctgtctggtgcctgtcgtactaaaatcacatagaccctgttacaagatcacggttccccttaactgctccgtagataacaacgtgaacattataaaatgtttagttttccctgtgagatagtccttcaggtcccatacactgatgaaactactgacccagctggtctgaaggaccccacaatgggctgactcaccaaagaatgcagtttccatatcgtgatgatttcatccccccttccccccgaccaatcaacaaccccaattttccaattatggagggagtctctcaccctctataatccccttaaaaaccccagaccaaagctccttggtgagataaacgggagggcctcctcccatctcgtcactcagcactctgcaatcattaaactttctctgctgcaaaccctgctgtcactatgtaatgggtctgttactgcacagtgggcatatgaacccattggtcctataacagaggcatgaagtgagcacatgctgttggaaaaatggtgatggtagacttgccaaaagcatggctgccacaaacattcaatttgtataaaacacggtatctgcaaagcacaataaaacaaagtgcaataagatgaggtgtggctgtatattcaaattaaaatgagatgtagttcttttactcaccacattggtaaatattactgggaaaataactgataatatccagagtgggaagtgtgtgggggtacaggtactcttgtactataaaatacaagtctatttttttaatagactttactttttagaacagttttaggttctcagcaaaattgagtgggcggttcagaatgcccatataatccctgccccacacatgcacagcctccccaacgatcaacagcccacactacaatcgtcttagcccactgggcagctataaccaaaacaacatagaccagtggcttataaacaaaagaatttatttctcacagttctggaggctgggaagttcaagatcaacatgctggcagatttggtgtctggttagggcctgcttcctcataggtgaggctttctcactgtaacctcatatggccgaaggggcgagggagtctctcaggtctcttttataaaagcactgatctcattcctaaggcctctgccctcatgaactaatcacctccaaaaggcccatctcctaatccatcaccttgtggggtaggatttcaacacagattattttgtaattcatagacgtgatgattgggtgttcctatgcatgtgtgagatgtgccaccttcaaaccttgttactgtaagagttaaagaaagaggaaagaagccagaaaaggggctcaacagtcaaaaacaggtttattttggagaataaacctgaaaggggcttctggccaatttcagtcaggaggattctctattgcaactatcaacagcctgcactacaatcgtcttagcccattgggctgctataaccaaaataacatagaccggtggctcataaacaacaagagtatatattggttttagagtgagagagctttatcacaggcttggaatgtttctgtgtgggggagaagtttatggtggggttggaatgtctctggcagaaggggaggttatgttggggctgacatctctctgccgggggggaagttatctccgggctggcttgtctctggtcagggagggatttatcttatggttgaaatgtttctggtcggagatgtcatttgtggcttatggtcatgctgaccttagtcattaggctgatgacctttggatttaggcaatttttgatcaaggggaactttagaatggcagtgcttgtccaagatggtgatgcttctgctctgtcagctaccatgtgggcatattacctatctgacatgaacttagaaaaaaagaaactaaaaaaaaaagcaaaaaggatttcaacgcactaatttgaagggatataaacattcaatccatggcaacagtggtacatttgttacaactgataaacctatgttgatacataattatcactcaagggctatagtttacatgaatacatcttgacaggtatccagcattataacatggcacagaatagtttcactgccctaaaaaccctctgtgctccactttttcttccctccctcactctaccctctggcaaccactgatcctttttctctctccatagttttgccttttccagaatgtcatgcagttgaaatcatacagtatgtagcctattcagagtcactgttttcatttagtaatatccagctaagtttcctccgtgtcctttcatggctgatagctcatttcttttcagtgctacatagtattccattgtctgggtgtatcataatttatttatccattctcctactgaaggacatcttttttgcttccaagttttgtcggttaaggttgctataagcatctatgtgcaggtttttatgtggatatgttttcaactcatgggagtaaataccaaggagtacaattgctgatcatatggttagagtatgtttacttttataagaaactgcaaaattgtcttccaaggtggctgtaccattttgcatccccatcagcaatgaatgagagttcttgctgctccacaccctgaccagcatttggtgctgtccgtgttctggattttggccattctaaccggtgtgtagcggtatctttttgtcgttttaatttgcaattccctaatgatgcatgatgctgagcaccttttcatacgctcttttcacatctgtatgtcttctttgatgaagtgtctactctggtctttaattgggttgttcattttctcattgtttttttttttttaattttgttgtagagatagggtctcgactcaggtgatcctcctatctcagcctcccaaagtgctgggattacaggcatgagccaccacacccggcccttattgttgagttttaagaattctttgaataatttgggtaacagtcctttatccgaaagttatgtcttttgcaaacatgttctcccactctttgtcttgacttctcattctcttgatcattttagtgggaagttgtttcttggacaatatctagcaaaatgaaaaacgtacaccttttgactttactattatgcttctagaaatacttggacccatacccaaaactataggtacataaatatttgttgcaacattgtttccttctagaaatagaaaccaca

SEQ ID NO: 294 - DNA, 4889 bp, Homo sapiens
cactctgcctagaggctccagaagaagactggtctctcccaccacacagaggcctggaggaggcagaggccaggagggagaggtcccaagagcctgtgaaatgggtctggcctggctcccagctgggcaggaacacaggacttcaggacactaaggaccctgtcatgcccatggccagcacccaccagtgctggtgcctgcctgtccagagctgaccagggagatggtgctggcccaggggctgctctccatggccctgctggccctgtgctgggagcgcagcctggcaggggcagaagaaaccatcccgctgcagaccctgcgctgctacaacgactacaccagccacatcacctgcaggtgggcagacacccaggatgcccagcggctcgtcaacgtgaccctcattcgccgggtgaatgaggacctcctggagccagtgtcctgtgacctcagtgatgacatgccctggtcagcctgcccccatccccgctgcgtgcccaggagatgtgtcattccctgccagagttttgtcgtcactgacgttgactacttctcattccaaccagacaggcctctgggcacccggctcaccgtcactctgacccagcatgtccagcctcctgagcccagggacctgcagatcagcaccgaccaggaccacttcctgctgacctggagtgtggcccttgggagtccccagagccactggttgtccccaggggatctggagtttgaggtggtctacaagcggcttcaggactcttgggaggacgcagccatcctcctctccaacacctcccaggccaccctggggccagagcacctcatgcccagcagcacctacgtggcccgagtacggacccgcctggccccaggttctcggctctcaggacgtcccagcaagtggagcccagaggtttgctgggactcccagccaggggatgaggcccagccccagaacctggagtgcttctttgacggggccgccgtgctcagctgctcctgggaggtgaggaaggaggtggccagctcggtctcctttggcctattctacaagcccagcccagatgcaggctctgctgtgctcctcagggaggaagagtgctccccagtgctgagggaggggctcggcagcctccacaccaggcaccactgccagattcccgtgcccgaccccgcgacccacggccaatacatcgtctctgttcagccaaggagggcagagaaacacataaagagctcagtgaacatccagatggcccctccatccctcaacgtgaccaaggatggagacagctacagcctgcgctgggaaacaatgaaaatgcgatacgaacacatagaccacacatttgagatccagtacaggaaagacacggccacgtggaaggacagcaagaccgagaccctccagaacgcccacagcatggccctgccagccctggagccctccaccaggtactgggccagggtgagggtcaggacctcccgcaccggctacaacgggatctggagtgagtggagtgaggcgcgctcctgggacaccgagtcggtgctgcctatgtgggtgctggccctcatcgtgatcttcctcaccatcgctgtgctcctggccctccgcttctgtggcatctacgggtacaggctgcgcagaaagtgggaggagaagatccccaaccccagcaagagccacctgttccagaacgggagcgcagagctttggcccccaggcagcatgtcggccttcactagcgggagtcccccacaccaggggccgtggggcagccgcttccctgagctggagggggtgttccctgtaggattcggggacagcgaggtgtcacctctcaccatagaggaccccaagcatgtctgtgatccaccatctgggcctgacacgactccagctgcctcagatctacccacagagcagccccccagcccccagccaggcccgcctgccgcctcccacacacctgagaaacaggcttccagctttgacttcaatgggccctacctggggccgccccacagccgctccctacctgacatcctgggccagccggagcccccacaggagggtgggagccagaagtccccacctccagggtccctggagtacctgtgtctgcctgctggggggcaggtgcaactggtccctctggcccaggcgatgggaccgggacaggccgtggaagtggagagaaggccgagccagggggctgcagggagtccctccctggagtccgggggaggccctgcccctcctgctcttgggccaagggtgggaggacaggaccaaaaggacagccctgtggctatacccatgagctctggggacactgaggaccctggagtggcctctggttatgtctcctctgcagacctggtattcaccccaaactcaggggcctcgtctgtctccctagttccctctctgggcctcccctcagaccagacccccagcttatgtcctgggctggccagtggaccccctggagccccaggccctgtgaagtcagggtttgagggctatgtggagctccctccaattgagggccggtcccccaggtcaccaaggaacaatcctgtcccccctgaggccaaaagccctgtcctgaacccaggggaacgcccggcagatgtgtccccaacatccccacagcccgagggcctccttgtcctgcagcaagtgggcgactattgcttcctccccggcctggggcccggccctctctcgctccggagtaaaccttcttccccgggacccggtcctgagatcaagaacctagaccaggcttttcaagtcaagaagcccccaggccaggctgtgccccaggtgcccgtcattcagctcttcaaagccctgaagcagcaggactacctgtctctgcccccttgggaggtcaacaagcctggggaggtgtgttgagacccccaggcctagacaggcaaggggatggagagggcttgccttccctcccgcctgaccttcctcagtcatttctgcaaagccaaggggcagcctcctgtcaaggtagctagaggcctgggaaaggagatagccttgctccggcccccttgaccttcagcaaatcacttctctccctgcgctcacacagacacacacacacacacgtacatgcacacatttttcctgtcaggttaacttatttgtaggttctgcattattagaactttctagatatactcattccatctccccctcatttttttaatcaggtttccttgcttttgccatttttcttccttcttttttcactgatttattatgagagtggggctgaggtctgagctgagccttatcagactgagatgcagctggttgtgttgaggacttgtgtgggctgcctgtccccggcagtcgctgatgcacatgacatgattctcatctgggtgcagaggtgggaggcaccaggtgggcacccgtgggggttagggcttggaagagtggcacaggactgggcacgctcagtgaggctcagggaattcagactagcctcgattgtcactccgagaaatgggcatggtattgggggtcgggggggcggtgcaagggacgcacatgagagactgtttgggagcttctggggagccctgctagttgtctcagtgatgtctgtgggacctccagtcccttgagaccccacgtcatgtagagaagttaacggcccaagtggtgggcaggctggcgggacctggggaacatcaggagaggagtccagagcccacgtctactgcggaaaagtcaggggaaactgccaaacaaaggaaaatgccccaaaggcatatatgctttagggcctttggtccaaatggcccgggtggccactcttccagatagaccaggcaactctccctcccaccggccacagatgaggggctgctgatctatgcctgggcctgcaccagggattatggttcttttaaatctttgcctttcagatacaggaaaaataatggcattaaattgctttaatttgcattattttagttatccagtttgcacatatttttataggtatcttaggcatcgattggtattttttaactgggccaagcccattaaggtctttcttctgttgggtgctatcattttctgattaagtctttttgactattgacatacagtctttcacagatggtggagtgtttttcccccaaatctgttgtttgtcttataatgttgtatatgaggttttatggtgtatgaatatgaatgcttctgtaatgtcaaacagatccctagtaaactccttcttcacttttactgtcagatttacaaaggtcctcccattgcaaagcagtgtttgtcctaatttatatattgtttttctagttcattttgtgtttccaacttttcatgtaaaattttaattatttttgaatgtgtggatgtgagactgaggtgccttttggtactgaaattctttttccatgtacctgaagtgttacttttgtgatataggaaatccttgtatatatactttattggtccctaggcttcctattttgttaccttgctttctctatggcatccaccattttgattgttctacttttatgatatgttttcataagtggttaagcaagtattctcgttacttttgctcttaaatccctattcattacagcaatgttggtggtcaaagaaaatgataaacaacttgaatgttcaatggtcctgaaatacataacaacattttagtacattgtaaagtagaatcctctgttcataatgaacaagatgaaccaatgtggattagaaagaagtccgagatattaattccaaaatatccagacattgttaaagggaaaaaattgcaataaaatatttgtaacataaaacaaagtgaaaccctgaa

SEQ ID NO: 295 - protein, 901 aa, Homo sapiens
MVLAQGLLSMALLALCWERSLAGAEETIPLQTLRCYNDYTSHITCRWADTQDAQRLVNVTLIRRVNEDLLEPVSCDLSDDMPWSACPHPRCVPRRCVIPCQSFVVTDVDYFSFQPDRPLGTRLTVTLTQHVQPPEPRDLQISTDQDHFLLTWSVGSPQSHWLSPGDLEFEVVYKRLQDSWEDAAILLSNTSQATLGPEHLMPSSTYVARVRTRLAPGSRLSGRPSKWSPEVCWDSQPGDEAQPQNLECFFDGAAVLSCSWEVRKEVASSVSFGLFYKPSPDAGSAVLLREEECSPVLREGLGSLHTRHHCQIPVPDPATHGQYIVSVQPRRAEKHIKSSVNIQMAPPSLNVTKDGDSYSLRWETMKMRYEHIDHTFEIQYRKDTATWKDSKTETLQNAHSMALPALEPSTRYWARVRVRTSRTGYNGIWSEWSEARSWDTESVLPMWVLALIVIFLTIAVLLALRFCGIYGYRLRRKWEEKIPNPSKSHLFQNGSAELWPPGSMSAFTSGSPPHQGPWGSRFPELEGVFPVGFGDSEVSPLTIEDPKHVCDPPSGPDTTPAASDLPTEQPPSPQPGPPAASHTPEKQASSFDFNGPYLGPPHSRSLPDILGQPEPPQEGGSQKSPPPGSLEYLCLPAGGQVQLVPLAQAMGPGQAVEVERRPSQGAAGSPSLESGGGPAPPALGPRVGGQDQKDSPVAIPMSSGDTEDPGVASGYVSSADLVFTPNSGASSVSLVPSLGLPSDQTPSLCPGLASGPPGAPGPVKSGFEGYVELPPIEGRSPRSPRNNPVPPEAKSPVLNPGERPADVSPTSPQPEGLLVLQQVGDYCFLPGLGPGPLSLRSKPSSPGPGPEIKNLDQAFQVKKPPGQAVPQVPVIQLFKALKQQDYLSLPPWEVNKPGEVC

SEQ ID NO: 296 - DNA, 4871 bp, Homo sapiens
cactctgcctagaggctccagaagaagactggtctctcccaccacacagaggcctggaggaggcagaggccaggagggagaggtcccaagagcctgtgaaatgggtctggcctggctcccagctgggcaggaacacaggacttcaggacactaaggaccctgtcatgcccatggccagcacccaccagtgctggtgcctgcctgtccagagctgaccagggagatggtgctggcccaggggctgctctccatggccctgctggccctgtgctgggagcgcagcctggcaggggcagaagaaaccatcccgctgcagaccctgcgctgctacaacgactacaccagccacatcacctgcaggtgggcagacacccaggatgcccagcggctcgtcaacgtgaccctcattcgccgggtgaatgaggacctcctggagccagtgtcctgtgacctcagtgatgacatgccctggtcagcctgcccccatccccgctgcgtgcccaggagatgtgtcattccctgccagagttttgtcgtcactgacgttgactacttctcattccaaccagacaggcctctgggcacccggctcaccgtcactctgacccagcatgtccagcctcctgagcccagggacctgcagatcagcaccgaccaggaccacttcctgctgacctggagtgtggcccttgggagtccccagagccactggttgtccccaggggatctggagtttgaggtggtctacaagcggcttcaggactcttgggaggacgcagccatcctcctctccaacacctcccaggccaccctggggccagagcacctcatgcccagcagcacctacgtggcccgagtacggacccgcctggccccaggttctcggctctcaggacgtcccagcaagtggagcccagaggtttgctgggactcccagccaggggatgaggcccagccccagaacctggagtgcttctttgacggggccgccgtgctcagctgctcctgggaggtgaggaaggaggtggccagctcggtctcctttggcctattctacaagcccagcccagatgcaggggaggaagagtgctccccagtgctgagggaggggctcggcagcctccacaccaggcaccactgccagattcccgtgcccgaccccgcgacccacggccaatacatcgtctctgttcagccaaggagggcagagaaacacataaagagctcagtgaacatccagatggcccctccatccctcaacgtgaccaaggatggagacagctacagcctgcgctgggaaacaatgaaaatgcgatacgaacacatagaccacacatttgagatccagtacaggaaagacacggccacgtggaaggacagcaagaccgagaccctccagaacgcccacagcatggccctgccagccctggagccctccaccaggtactgggccagggtgagggtcaggacctcccgcaccggctacaacgggatctggagtgagtggagtgaggcgcgctcctgggacaccgagtcggtgctgcctatgtgggtgctggccctcatcgtgatcttcctcaccatcgctgtgctcctggccctccgcttctgtggcatctacgggtacaggctgcgcagaaagtgggaggagaagatccccaaccccagcaagagccacctgttccagaacgggagcgcagagctttggcccccaggcagcatgtcggccttcactagcgggagtcccccacaccaggggccgtggggcagccgcttccctgagctggagggggtgttccctgtaggattcggggacagcgaggtgtcacctctcaccatagaggaccccaagcatgtctgtgatccaccatctgggcctgacacgactccagctgcctcagatctacccacagagcagccccccagcccccagccaggcccgcctgccgcctcccacacacctgagaaacaggcttccagctttgacttcaatgggccctacctggggccgccccacagccgctccctacctgacatcctgggccagccggagcccccacaggagggtgggagccagaagtccccacctccagggtccctggagtacctgtgtctgcctgctggggggcaggtgcaactggtccctctggcccaggcgatgggaccgggacaggccgtggaagtggagagaaggccgagccagggggctgcagggagtccctccctggagtccgggggaggccctgcccctcctgctcttgggccaagggtgggaggacaggaccaaaaggacagccctgtggctatacccatgagctctggggacactgaggaccctggagtggcctctggttatgtctcctctgcagacctggtattcaccccaaactcaggggcctcgtctgtctccctagttccctctctgggcctcccctcagaccagacccccagcttatgtcctgggctggccagtggaccccctggagccccaggccctgtgaagtcagggtttgagggctatgtggagctccctccaattgagggccggtcccccaggtcaccaaggaacaatcctgtcccccctgaggccaaaagccctgtcctgaacccaggggaacgcccggcagatgtgtccccaacatccccacagcccgagggcctccttgtcctgcagcaagtgggcgactattgcttcctccccggcctggggcccggccctctctcgctccggagtaaaccttcttccccgggacccggtcctgagatcaagaacctagaccaggcttttcaagtcaagaagcccccaggccaggctgtgccccaggtgcccgtcattcagctcttcaaagccctgaagcagcaggactacctgtctctgcccccttgggaggtcaacaagcctggggaggtgtgttgagacccccaggcctagacaggcaaggggatggagagggcttgccttccctcccgcctgaccttcctcagtcatttctgcaaagccaaggggcagcctcctgtcaaggtagctagaggcctgggaaaggagatagccttgctccggcccccttgaccttcagcaaatcacttctctccctgcgctcacacagacacacacacacacacgtacatgcacacatttttcctgtcaggttaacttatttgtaggttctgcattattagaactttctagatatactcattccatctccccctcatttttttaatcaggtttccttgcttttgccatttttcttccttcttttttcactgatttattatgagagtggggctgaggtctgagctgagccttatcagactgagatgcagctggttgtgttgaggacttgtgtgggctgcctgtccccggcagtcgctgatgcacatgacatgattctcatctgggtgcagaggtgggaggcaccaggtgggcacccgtgggggttagggcttggaagagtggcacaggactgggcacgctcagtgaggctcagggaattcagactagcctcgattgtcactccgagaaatgggcatggtattgggggtcgggggggcggtgcaagggacgcacatgagagactgtttgggagcttctggggagccctgctagttgtctcagtgatgtctgtgggacctccagtcccttgagaccccacgtcatgtagagaagttaacggcccaagtggtgggcaggctggcgggacctggggaacatcaggagaggagtccagagcccacgtctactgcggaaaagtcaggggaaactgccaaacaaaggaaaatgccccaaaggcatatatgctttagggcctttggtccaaatggcccgggtggccactcttccagatagaccaggcaactctccctcccaccggccacagatgaggggctgctgatctatgcctgggcctgcaccagggattatggttcttttaaatctttgcctttcagatacaggaaaaataatggcattaaattgctttaatttgcattattttagttatccagtttgcacatatttttataggtatcttaggcatcgattggtattttttaactgggccaagcccattaaggtctttcttctgttgggtgctatcattttctgattaagtctttttgactattgacatacagtctttcacagatggtggagtgtttttcccccaaatctgttgtttgtcttataatgttgtatatgaggttttatggtgtatgaatatgaatgcttctgtaatgtcaaacagatccctagtaaactccttcttcacttttactgtcagatttacaaaggtcctcccattgcaaagcagtgtttgtcctaatttatatattgtttttctagttcattttgtgtttccaacttttcatgtaaaattttaattatttttgaatgtgtggatgtgagactgaggtgccttttggtactgaaattctttttccatgtacctgaagtgttacttttgtgatataggaaatccttgtatatatactttattggtccctaggcttcctattttgttaccttgctttctctatggcatccaccattttgattgttctacttttatgatatgttttcataagtggttaagcaagtattctcgttacttttgctcttaaatccctattcattacagcaatgttggtggtcaaagaaaatgataaacaacttgaatgttcaatggtcctgaaatacataacaacattttagtacattgtaaagtagaatcctctgttcataatgaacaagatgaaccaatgtggattagaaagaagtccgagatattaattccaaaatatccagacattgttaaagggaaaaaattgcaataaaatatttgtaacataaaacaaagtgaaaccctgaa

SEQ ID NO: 297 - protein, 895 aa, Homo sapiens
MVLAQGLLSMALLALCWERSLAGAEETIPLQTLRCYNDYTSHITCRWADTQDAQRLVNVTLIRRVNEDLLEPVSCDLSDDMPWSACPHPRCVPRRCVIPCQSFVVTDVDYFSFQPDRPLGTRLTVTLTQHVQPPEPRDLQISTDQDHFLLTWSVGSPQSHWLSPGDLEFEVVYKRLQDSWEDAAILLSNTSQATLGPEHLMPSSTYVARVRTRLAPGSRLSGRPSKWSPEVCWDSQPGDEAQPQNLECFFDGAAVLSCSWEVRKEVASSVSFGLFYKPSPDAGEEECSPVLREGLGSLHTRHHCQIPVPDPATHGQYIVSVQPRRAEKHIKSSVNIQMAPPSLNVTKDGDSYSLRWETMKMRYEHIDHTFEIQYRKDTATWKDSKTETLQNAHSMALPALEPSTRYWARVRVRTSRTGYNGIWSEWSEARSWDTESVLPMWVLALIVIFLTIAVLLALRFCGIYGYRLRRKWEEKIPNPSKSHLFQNGSAELWPPGSMSAFTSGSPPHQGPWGSRFPELEGVFPVGFGDSEVSPLTIEDPKHVCDPPSGPDTTPAASDLPTEQPPSPQPGPPAASHTPEKQASSFDFNGPYLGPPHSRSLPDILGQPEPPQEGGSQKSPPPGSLEYLCLPAGGQVQLVPLAQAMGPGQAVEVERRPSQGAAGSPSLESGGGPAPPALGPRVGGQDQKDSPVAIPMSSGDTEDPGVASGYVSSADLVFTPNSGASSVSLVPSLGLPSDQTPSLCPGLASGPPGAPGPVKSGFEGYVELPPIEGRSPRSPRNNPVPPEAKSPVLNPGERPADVSPTSPQPEGLLVLQQVGDYCFLPGLGPGPLSLRSKPSSPGPGPEIKNLDQAFQVKKPPGQAVPQVPVIQLFKALKQQDYLSLPPWEVNKPGEVC

SEQ ID NO: 298 - DNA, 4820 bp, Homo sapiens
gcctggaggaggcagaggccaggagggagaggtcccaagagcctgtgaaatgggtctggcctggctcccagctgggcaggaacacaggacttcaggacactaaggaccctgtcatgcccatggccagcacccaccagtgctggtgcctgcctgtccagagctgaccagggagatggtgctggcccaggggctgctctccatggccctgctggccctgtgctgggagcgcagcctggcaggggcagaagaaaccatcccgctgcagaccctgcgctgctacaacgactacaccagccacatcacctgcaggtgggcagacacccaggatgcccagcggctcgtcaacgtgaccctcattcgccgggtgaatgaggacctcctggagccagtgtcctgtgacctcagtgatgacatgccctggtcagcctgcccccatccccgctgcgtgcccaggagatgtgtcattccctgccagagttttgtcgtcactgacgttgactacttctcattccaaccagacaggcctctgggcacccggctcaccgtcactctgacccagcatgtccagcctcctgagcccagggacctgcagatcagcaccgaccaggaccacttcctgctgacctggagtgtggcccttgggagtccccagagccactggttgtccccaggggatctggagtttgaggtggtctacaagcggcttcaggactcttgggaggacgcagccatcctcctctccaacacctcccaggccaccctggggccagagcacctcatgcccagcagcacctacgtggcccgagtacggacccgcctggccccaggttctcggctctcaggacgtcccagcaagtggagcccagaggtttgctgggactcccagccaggggatgaggcccagccccagaacctggagtgcttctttgacggggccgccgtgctcagctgctcctgggaggtgaggaaggaggtggccagctcggtctcctttggcctattctacaagcccagcccagatgcaggggaggaagagtgctccccagtgctgagggaggggctcggcagcctccacaccaggcaccactgccagattcccgtgcccgaccccgcgacccacggccaatacatcgtctctgttcagccaaggagggcagagaaacacataaagagctcagtgaacatccagatggcccctccatccctcaacgtgaccaaggatggagacagctacagcctgcgctgggaaacaatgaaaatgcgatacgaacacatagaccacacatttgagatccagtacaggaaagacacggccacgtggaaggacagcaagaccgagaccctccagaacgcccacagcatggccctgccagccctggagccctccaccaggtactgggccagggtgagggtcaggacctcccgcaccggctacaacgggatctggagtgagtggagtgaggcgcgctcctgggacaccgagtcggtgctgcctatgtgggtgctggccctcatcgtgatcttcctcaccatcgctgtgctcctggccctccgcttctgtggcatctacgggtacaggctgcgcagaaagtgggaggagaagatccccaaccccagcaagagccacctgttccagaacgggagcgcagagctttggcccccaggcagcatgtcggccttcactagcgggagtcccccacaccaggggccgtggggcagccgcttccctgagctggagggggtgttccctgtaggattcggggacagcgaggtgtcacctctcaccatagaggaccccaagcatgtctgtgatccaccatctgggcctgacacgactccagctgcctcagatctacccacagagcagccccccagcccccagccaggcccgcctgccgcctcccacacacctgagaaacaggcttccagctttgacttcaatgggccctacctggggccgccccacagccgctccctacctgacatcctgggccagccggagcccccacaggagggtgggagccagaagtccccacctccagggtccctggagtacctgtgtctgcctgctggggggcaggtgcaactggtccctctggcccaggcgatgggaccgggacaggccgtggaagtggagagaaggccgagccagggggctgcagggagtccctccctggagtccgggggaggccctgcccctcctgctcttgggccaagggtgggaggacaggaccaaaaggacagccctgtggctatacccatgagctctggggacactgaggaccctggagtggcctctggttatgtctcctctgcagacctggtattcaccccaaactcaggggcctcgtctgtctccctagttccctctctgggcctcccctcagaccagacccccagcttatgtcctgggctggccagtggaccccctggagccccaggccctgtgaagtcagggtttgagggctatgtggagctccctccaattgagggccggtcccccaggtcaccaaggaacaatcctgtcccccctgaggccaaaagccctgtcctgaacccaggggaacgcccggcagatgtgtccccaacatccccacagcccgagggcctccttgtcctgcagcaagtgggcgactattgcttcctccccggcctggggcccggccctctctcgctccggagtaaaccttcttccccgggacccggtcctgagatcaagaacctagaccaggcttttcaagtcaagaagcccccaggccaggctgtgccccaggtgcccgtcattcagctcttcaaagccctgaagcagcaggactacctgtctctgcccccttgggaggtcaacaagcctggggaggtgtgttgagacccccaggcctagacaggcaaggggatggagagggcttgccttccctcccgcctgaccttcctcagtcatttctgcaaagccaaggggcagcctcctgtcaaggtagctagaggcctgggaaaggagatagccttgctccggcccccttgaccttcagcaaatcacttctctccctgcgctcacacagacacacacacacacacgtacatgcacacatttttcctgtcaggttaacttatttgtaggttctgcattattagaactttctagatatactcattccatctccccctcatttttttaatcaggtttccttgcttttgccatttttcttccttcttttttcactgatttattatgagagtggggctgaggtctgagctgagccttatcagactgagatgcagctggttgtgttgaggacttgtgtgggctgcctgtccccggcagtcgctgatgcacatgacatgattctcatctgggtgcagaggtgggaggcaccaggtgggcacccgtgggggttagggcttggaagagtggcacaggactgggcacgctcagtgaggctcagggaattcagactagcctcgattgtcactccgagaaatgggcatggtattgggggtcgggggggcggtgcaagggacgcacatgagagactgtttgggagcttctggggagccctgctagttgtctcagtgatgtctgtgggacctccagtcccttgagaccccacgtcatgtagagaagttaacggcccaagtggtgggcaggctggcgggacctggggaacatcaggagaggagtccagagcccacgtctactgcggaaaagtcaggggaaactgccaaacaaaggaaaatgccccaaaggcatatatgctttagggcctttggtccaaatggcccgggtggccactcttccagatagaccaggcaactctccctcccaccggccacagatgaggggctgctgatctatgcctgggcctgcaccagggattatggttcttttaaatctttgcctttcagatacaggaaaaataatggcattaaattgctttaatttgcattattttagttatccagtttgcacatatttttataggtatcttaggcatcgattggtattttttaactgggccaagcccattaaggtctttcttctgttgggtgctatcattttctgattaagtctttttgactattgacatacagtctttcacagatggtggagtgtttttcccccaaatctgttgtttgtcttataatgttgtatatgaggttttatggtgtatgaatatgaatgcttctgtaatgtcaaacagatccctagtaaactccttcttcacttttactgtcagatttacaaaggtcctcccattgcaaagcagtgtttgtcctaatttatatattgtttttctagttcattttgtgtttccaacttttcatgtaaaattttaattatttttgaatgtgtggatgtgagactgaggtgccttttggtactgaaattctttttccatgtacctgaagtgttacttttgtgatataggaaatccttgtatatatactttattggtccctaggcttcctattttgttaccttgctttctctatggcatccaccattttgattgttctacttttatgatatgttttcataagtggttaagcaagtattctcgttacttttgctcttaaatccctattcattacagcaatgttggtggtcaaagaaaatgataaacaacttgaatgttcaatggtcctgaaatacataacaacattttagtacattgtaaagtagaatcctctgttcataatgaacaagatgaaccaatgtggattagaaagaagtccgagatattaattccaaaatatccagacattgttaaagggaaaaaattgcaataaaatatttgtaacataaaacaaagtgaaaccctgaa

SEQ ID NO: 299 - protein, 895 aa, Homo sapiens; identical to SEQ ID NO: 297

SEQ ID NO: 300 - DNA, 50378 bp, Mus musculus
  misc_feature (1)...(50378): n = A,T,C or G
ctgttctaacaccggcatgcttaccctgggtgagtctcaccagaatctgtggtctttagcctgggggatatttgggtgtccaggggaccttaagatatttggagacacttctgtttctcacagccaatggtgggagcatggccaaggaaggctagacctgaggatgcccaggatagcttcatggtgaaggttggttggcagacctgcctaggtggaatggcctatccacatggcattaccaagagtacagaggctgagccccacaacctccagcaggtcctctcaaggatcactgaggacttcagccattttaaaaaggaagcaagtctgtggccaggaggtggtgagcagccgtagtaacagttttagcccacagcacaggctggtttctggagcttggcattcttttgtggctcctctccctttcatcagccctggccctcttggcctgatgatctccaagagcctcaagtcctcagcccaggtcttcctcctcctcactggagtcatcatacatgactactgagtcccacccctgtgggaggcccctcccagctctaccacttcctctcattctcatagccgcaggtccgcccacactaggccctcatcattcccagaattggccattgcagtcacacatgcctggggcttgttcaggagctgagtctggactcagcctctgccctcttgccctctgtatcattctttccaggtcgccccagacccccatcctcaccacctcccttctctttcatcctgctgtcctccctcatacccggcttatatcagactctgaaacaacatggatgtgatttgagaagatgatacaagtgcatcagagctttgaaaccctctccccacagtagactctccagtgagccggcactcctagatgctggtctgtttgatgactggttggtaaattcatccagaattaaagttgaagtagagtagtagatctgaaccttaagaaagccagaagacagatataacttacacaaacaccatggaaggctccctccagctcactctggtctagaactcattcatcacccaggctgtccttgaacttaggacaatccttctgcctcagcttcccaagtgctataggtgtgatcaactacagcagactttgtgttttttctcaacagtctttgtttcccatacaatttaaaagacaaatgcgcaagctggacgtggcagcacacacctttaatcccagcacttggaaggcagaggcagatggatctctgagtttgaggccagcctggtctacagaatccagaacaatcacagccacaagagaaccctgcctcaaaaaaaaaaaaaaaaaaacaaacaaacaaaaaaacacaagaacaacaaaaagcatgacccagctatatgttgtctacaagatgcatatagtttaaagtgaaagaatttaaggggacatgttatgcaaagaaaacccaagagcactgagtagttatactatgtacaggcttaagaaaaaaaaattcaaaagataaacaggttacatgtaaactcatggtgaatgtataatatccatatgcatactcacccaatattggaacccaaggtgttatatcataatactttgcagcttcagtgccattcttccaactatagagtcaccagggagtagaactgtttgcggaggatcagaggaattaggaggtgtggcctatcactggtaggtgggctgtggggtttcaaaagccgatgctgttctcagttagctctctctctctctctctctctctctctctctctctctctctctctctctctctctctctctctctctctgcctgtgttttctgatcagatgtgagctctcagctgctgctcaggttccacacctattcctgccatgctccccaccgatgtacttatggactcaatctctggaactttcggcttcaatgcactcttctactagttgccttggtcatgcaactagtcatgtctcttcacagcaatagaaaagtaactaagacaatggacttaagaagagtgaaatttccaggtgtggtggtacccactttacttccagcaatggggaggcagaggcaggtagacctctgtgagttagaggctagcctgatctatatagcaagttacaggacagctaggactcaggactacaaagaaaaaccctgtccagaaaaaggaaaaaaaggagggagagagagagagagggagagagagagagagagagagaaagagagagagagagagagagagagagagagagagagagagagagagagagagagagagattacactgtcttttctgactacagtgaaaagaaatctggatatcaatggcaagtatacagctgtatggaagttaaaagtcacactcctaatcagccagcaggtcacagcagaactcacaaaagagatcagaaagcaagcaagaacgaaccaatgttaggatttgaatgtccccaaggcccatctactcaaggcttgaccttcaccctctgatgctgctgcaaggtggcagagcttttaggaggtgggacctagtaggaggcatttaagccattgaaggtgtgtactcttgagggagatattagaattctagcttctcttcttggccacaatgagataaagcatgtttcttccttcacactcttctttcatgacacattcccctgctaaaattcaaaagcaactggatggtgagaattctgaaaccttgagtcaaaataaacctttcttctttttatattgagctctctgctgttttgtcatggcgctgaaaagccagaatctccccagaccaaaactttcagggacatattgaaaacccaagagaatgataactgcaaatatactcattcaaataacaacttagataaagaacctaactctatccttttacatgattgtcggggcctcaaacactggagtcgtggccttttattttaattttttaattgtgtgaatacatttgtgcagctgcctgaagagggcctggatgtcagattactcagctgctgaaattataggcagttccaagctgtctgacacggccactgggactgaaccctactctgcaagaacagtgcaccctcctaaatgctgagtcacctttcagcttcctaactggactccttaaggaactagaaaaagaaattgaaacccaatggttgcataagagattaactaatgcttgctagaatggacacaaataaaaactggaaaaacagcagagaggattaacaaaaccaagttatttctttgaacaaaaatcaggaaaacataacaaacctttagttagacgaagcaaaagagacagaaacttaaaataagatcaaagatggaaaaagaaatagtgccccctcttgcacataaaacttcggtgagcgcccatcaccaaaactgagtcaaaaagaaaaagaaccccttagtggaccgaagaacacacagggagctgaacttcgatggggattctgccaaaccctgaaagcattacccttattcctcctcaaactgttctacagagaagaggaaaaatgattcctaacgcactctgatgctaactccaggcaaggacaccatgggggaaatttaaaaaacaacatcgacaacaaaaacacgaaaaaactacaggataacgtcctcatgaacacagacataaaatccacaacaaagtgctgggaaaaaaaagaagaagtcttgcgttaaacagactgtataacccacggctgctgtggttagggtgtgggtcttggttgcaagctgcctggctttgtacagcaactggctcacgaaggctctgagctcatcaacagagcgcccactcatgaactcataatcggatggaactgtggggaagtggtagacacctgcatgtggagtctgcttggactaagtggatcgctaggagtatgccttgaggaatctacccactctctcatccctttctgtctccctctgcttcctggcccacaagagcaagcagcttgttctataaccccctctctgccatgatgctcagtcttacgatggccccaaagtaacagaccaagtagaccgaagctactgcaaccttcagcccccaaatctcccctctttccccactgtcctatcaagagtttgctagtgatgacaatgtctcattgtgtagagttctctctggaatgcaagggtagctcagaataatgctaatcactgccatccacgctctcattgatagaacctagcggaacggaacccgtgggcatctgtcctaatgcaaagtaggaatgcaagggacttccctcagcctggtaaaggccataagcaaaagactcacagctaagatcacattcacaacccccccccaaaaaaaaaaacctgaaagtttcccctaaggtcaggagcaaggtcgcccactttaccacctctattcaaccttgcaccaaaacttttaaccagacaattcagcaggaaaaagaaataaattaaaaacaaaaaacaaaaacaaaaaacaacacccccccaaaaaaaatccccaaaggtaatactacctttgttaacaatgccatgatcctaaatacatcaagtctagacatctgtggagcaatcactagacacaatgactggtttagcagagcagtggtgtgcaggtgtcagtgtgcttctgtccatgtgcactcatgtgagcacggcaggccatagcctcaaaggtaaaggtttagcaatagagagaaccaaggcaatgccgggtgtgttccaaaccctgcaggacaccctgaaagtattaaaggagacttgggtaagccgcaggacatcccacgcccatggactcatacagttaacattgctaagatttcagcctttctagaagcaatctatggactgaatgtaatgcctctcaaatcttgatgcccccttttatttttaatgaagaagctgtgtttgcaagtgggcaaggatggctgaaatcttctctgggaaaataacaaagttggagaacataaactcccagtttcaggacctaccacaggtcttcagtgttcaaactgcatgtcgccagtatgggatagacctggagagatctgatggcagctggaatttcatgcctgtgggcagctgattttcagtcggaacaccaagtacttgttgtaaaagcaagagaactggggttcagcaccctagaccctgtgtaaatggcaggtgggcatgggggctccctgttattccaggctcagaagtaggagacagatctcggagcaagctaactagtatgactagtatgacgagccacagaggcaagccctgggttgagacccaggcttgataaataaggtggggtgatttccccctccctcccaaggtggagtgattgaggaagacttttaacaccatctaaggccttcacacacccatacacacatggcatgcacacaggaaaaggaggaaaaacatcaggatcagcaagtggcatggcagagtgagcccttctagcttgctgacaggtacctaacacaatgcagccactgtgggatggctggccagctaagttaaacacagagttgtgacacagcctggcagtttagccccaggtatacccaccggaggcctgaggattctttttttttttttctttttttcaagacagggtttctctgtgtagccctggctgtcctggaactcactctgtagaccaggctggcctcgaactcagaaatccccctgcctctgcctcccaagtgctgggattaaaggcgtgtgccaccaccaccacctggctgcctgaggattcttgtttgcacgaaggctatatcatccaaaattggggtggtgtgtgtgggaaagaccaccatccatccaaatgtccacccatgtatgcttggtgtagtacgtctgtgttgcggaatactattcagcagggaaaaggaatgaggtgccaacacatactacaacacagccaagtcccaccttatgcagagtggaagaggctagatgtgacattcccagaaaagaaaaatgagctgggaggtatggcagatatatcaggtgcacctgtgagctcacatggggtccacatcaaacacaggggttctatttaggtgatggaatgtcccagccacttagcagcagtcatgggtgtccaattcatcaagtttactaaaaaaaaaaaaaaaaaaccaccaaatcgtacacttacagtgcccaaaatatatgttaagcaaatccctcctcagtgagtgagttctttaaataaattttaaaaaaattaaaaagaggaagtaggttagagagggcttatcctgttatgtcttctcagaagacccctgggcagaagagcgcagtggccacttcccccacttggccagctctgctatttggagtgctgaggaagggcacgagggcctcacagatctctccagggctaacagctactcttggtgacttttacagagcaggagggaccctccccttagcacacgtctactttggaggtcaatactccttcacccagctgggcaggatcagcgccttatcatccacttaagtccagaggactaagcagccctggctgtattccccaccccctgtcccccagggcactgccccctgccttgagtcagtatcttagtttgtagccagggtggtcttgaacttggtgtcctcctgcatcagtattccgagtgctgagatctcaatgctattcttttgctgatgtaaatcagatcggagtttctcctctgccaactccctaggaattctcatgtttcatccaaatcaaatccgcgcccagaggtgagcatgctgtatgatcccccacgctctctgttctttcccatcttcacacgtgtgcatcctgcctcacgtgatgacgtcatgctgtcagtctgtctgtcttctctaccagagatgggctccacgagggctgtcctttgtacacctttctaaggcacttcattaggatgtacccaagggcccacttcacgggaaaggatggagggaaggaagaaggggctggctgagtctgcagaggagtgaatgagtggacaggggatgggcagggtgtggagagggagtggggagggtgtggagagggggtagggaagggtggggagggagggagtgggatgccgagctgcctcctgctaattcacactcagaaacggtgagttggatggagcatggctctggagttcaaatcccagttctgccattggctaaggtgtgaccttaggcaagttctgtaacttccttcactcatctgcaacacagggaacatgaaaacgctggtggcaagattcagtggtcagccctccggaaggaggagggggcgagtgtctctgtgacagcacagttcactgacaccaggaactctgcagatcagcaacttctcctctgccatcctgcctttgagctttcttaaactccaggctaagaaagaccttagaaggttcactgtgaagaccaagagaggagaaaaagaaaggaaatcagataaaggggaaaaagcaggaggaaggacggttgggggtggggagctggtgggaaggaaagcggagcagagggcaggggaggagaaagaaaagccagcttcatcctgaggtctcaggcaagcctggagcagacaccaacagccaccagtctgcagggcagacactcatggatcaaccatgagggaccctgtaggaagttccccaaacacagctttgaaaaggaaagatccagacagccacaaaaaatgggaggctttctcttaaaccagtcagtcatgtgggctgctcccaagcctttccaaaaacactggtcagaaaacactggtcagggcgaaggcggccggcgtgtacatctgagcccatcacgaccatggagacagctcaaacaactctggtctgacctcactcctcttaggttcaaatatcagctctaatgcctcatagcccaggagctagtttgctcccctgagcctcaatctcttcatctgtgaaatgggaacaggcttgtctgtcactcagggtctgtgggcaagtgccatcggagcacctgagcaatgtgagaaggagatggctctgacttcctctctctggggctgctgggcaggagctgcctggcttttgtcttctggcttccaaaagtctatttgtcaccccttttctgtacctctcacttgcttcaagacaaaaacaaaaacaaaaacaaaacaaaaaaacagtcttaagagtttcttttctactgcacgggtcagagaggactgctgtgcacacaccagctgcgctgtgtttcaggaatgggagcactcactgactccatgctttcctggttcccaagagcagctgtggatccctcttagcccctaccttttctcccagggcagaggactctgaggctggcaaagggaaagtctctcccctgggtccccagctgggagatgtgtaagccctgtagaagtcttagaaggttcgtgacaggaagggcactgaagtcatgccctctccagaagtgggaagtgagcaatttgatgatcggaggaactcatgggactggccgtctcctgtgctgaccatggatgagggcttgctgctcatgttatgcttaaattgttgaaacatagacaaagcttgcttttaggtctgtgggagtaccttgagaaggtaaatgctacagctgcaggagaacctacgcactgtctcaagagtggtcctgggcagagcacgggattggactagttcactgctcatcaatggagtcttcaacaagttgtttcgcctcaaaggttgactaaacattggcctcacgggtgcaggcatgaggtctgagtgacggctagagtgtcggtttgcacaggatagacatgatcttatgaacctgcttgtgagttctgaagagatgagtctcggaggcagattttaagggattctaaaagctgccctaaactatggggaccacccttggactgtcgagggaagaggcagaggcaggaggtcacccatggtttgacaggaatggtgatagcctcagcatggtcagaaaatgaatggaaacctcactgtttagaattaatttgaactttcaataataaagccctttttatgaggaaggaaggaaggaaggaaggaaggaaggaaggaaggaaggaaggaaggaaggaaggaaggaaggaagggagggagggaggagaaaggaaggaagagagagaaagaagggaggaaagaaagaaagaaagagagagagagaaagaaaaaaagaaagaaagaaagaaagacagacagacagacagacagacagaaagaaagaaagaaagaaagaaagaaagaaagaaagaaagaaagaaagaaagagtttattttctctatttgtttggatttctatctgtgtgtggctgccttgccctcctggctggacaaggggcacagcaaggctctcaggagcagcagggttctctcctccagggtagcagcgcatgtcctccttcccacaatgctgaggctggggactggggaatggatggtcatgagcagtgcttaaggcagaaagtctgagtgtctgggtcattctgaatcaggaccctggggcaggcaagggacagacaaaatggaccagttagacacctgtaaaagagcagtcatgaggtaggcgtccaccttcagtctgtcccatctgtgctgaggggctcagggtaaataccaagggcttcaggtgggatgtgctactgtcacatctctgtctcggtttctacatcttcaagaagtggcaagtcccacttcactgcctgcctcttgggacacgactgtgaggcctttgggatgatgtcatctgtctgcaagatgtcagaccccaaatatcgtgttaagggtgacctttggggagccgtgggtgcctgcttgcaggcatcttagtttttcttgccccttctggaggatctggctgggttgggcggggcactgtttaccacatcccctccccaccccttgcctggcctcagatagacaccgaagcctccgctggtggccctgtgtttcagtcgcacacagctgtctgcccacttctcctgtggtgtgcctcacggtcacttgcttgtctgaccgcaagtctgcccatccctggggcagccaactggcctcagcccgtgccccaggcgtgccctgtctctgtctggctgccccagccctactgtcttcctctgtgtaggctctgcccagatgcccggctggtcctcagcctcaggactatctcagcagtgactcccctgattctggacttgcacctgactgaactcctgcccacctcaaaccttcacctcccaccaccaccactccgagtcccgctgtgactcccacgcccaggagaccacccaagtgccccagcctaaagaatggctttctgagaaagaccctgaaggagtaggtaagtagactctagttcttgttctccctgagtctgggggccttttttctgtcttttgcataacactgtggtgggacacaggcaaagaacactacgcagttagtgtgggcagagtcagggctggagttccttgttcaactgactaaaaatgactaggaatgcccttgctgaatgttggagggttatggaggcaggagcatggctagcataatcccttgcctatgcaaaactgcctgcaagaagtggtgaggagaaaaaaaaagagagactctggatggtagacagtctgccaggcagtgataggcagtagccaggggcattgggaagcttccagggggccgttttgtagggaggaaatcaggtactaccggccagtatagtttattactttaactccatctatccttccaggcaggtggggtgcctacttcacagagaaggaaatctgactccacaggggaagagtgacattccttatgggtcttgtcatgatatggcaaggtgggcagtccaaccaggtgtcaccacccaaatccagggcctgggtcagatgataagaggtaacacctcttccatgagaagagaggggagcccggaggttgttggaagtctagtctagagaacagaataggagaaggcggcacatgggttaatagcataggaaataatgtctgtgcttaggacgtgtcaagaggaccagagcaggtcatagatgcattagagggtcacgagtagttcctaagagaatgtctgtgctctctgaggcagttagagcacatggtagcatttccgagtctagcagcgaaccagggcaagcctctctgcttctttgagcctcctgggtcctcactttctccatctgtaaaatggggatcaaggtggctctatctttgtgaggctgtttatgagaactccaggacatcagaatgtcaagattgacttcaggggctcctacacccaggtaccctgccccatggaggagaagggctaaccactgagagccaccaagaatacagggaaggctagaacagccctatctgtcgtgaattgtgagaacttggggacctcccagaaccctcagagtccaggtgaggccaatggccccatgcagctcggtgcatagatgtcaatactgggtggaccctgtgggggacaaacctgccttttggttaagagtgatgaagagagtcagaacagaaattggaacccagtctatatggcaggatgccgtcccataggaaaactcacagccttggaacattgtctaaggacatttctcagacagcacttagccacgtgatccccacagtggggtgttttctgcagtagccctgccctagggcccggtgtccactcttcagtggacctcagagagagaacgatagaatccctgactggcaggggagacagaaaggagagcatgtggaagatggaagagagacaggcaggctacctgctggggaagtgatttcctcacttctagggccaagcagcatcagataggcataagaagatggggtgtgctttctcccaaagccaggagtgggcttttgtgcatgggggcgaggagcagccatagccagtcagtgtcttcaactgggggagggttgcagggacacacacatggctaggcaggggtagcagctgtctttttgttgttgttgttgtttttttttaattctgggtgttgggtttgctgctgctgacagtttgagagggagctctctccatgcaacccaatctgcctcaaatctgtgattctcctgcctcagcctcttgaggactgggattacaggcgtgtgccactgtcccgcaatggctctgatggcagcgctgcatcccttgcagatgaggatgcagagattcagagagaaaaagtggttttcaggggccacccagagagccacttagaaggggaagagaaggaggccctgagagaggtggtctcaccttggcagtctttgcttcaaaaactggtctacagccccagaaacatgaaggggggagggaggagctgggagaggcccnnnnnnnnnnnnnnnnnnnnnnnnnnnnnnnnnnnnnnnnnnnnnnnnnnnnnnnnnnnnnnnnnnnnnnnnnnnnnnnnnnnnnnnnnnnnnnnnnnnnnnnnnnnnnnnnnnnnnnnnnnnnnnnnnnnnnnnnnnnnnnnnnnnnnnnnnnnnnnnnnnnnnnnnnnnnnnnnnnnnnnnnnnnnnnnnnnnnnnnnnnnnnnnnnnnnnnnnnnnnnnnnnnnnnnnnnnnnnnnnnnnnnnnnnnnnnnnnnnnnnnnnnnnnnnnnnnnnnnnnnnnnnnnnnnnnnnnnnnnnnnnnnnnnnnnnnnnnnnnnnnnnnnnnnnnnnnnnnnnnnnnnnnnnnnnnnnnnnnnnctcccctcccccaccagcctagcccgcgggaccaagggacttttcttgacaactcaaacatgagcgctgagtaaacctggaacttctgaaccaacctgagaatattccctggctggggccccttaaggacatctgtaccaagacctcggcctgctgtccctagggtccccagggaggatcaaagcactagaactgtccccaggaggaggggcaagtgcaggcatgtggcctggctgcccctcaaacctcaaccttcttcattgagtgagcagccatcgatgtggccctgggcctctctgggtctctgtttcttgatctgctaagtaggtctggtgtgataaccaagactggagtctcccattttctccagtgctgattaaaggttcatgcttcagattaggccagggtgggctgatgagaacagggtggggggtgggggtggtgttgggtttttgctgccttggccccaactttctgctgtagcttcaaacagccattcttcaaaacagcccttgtttgagagccctagagagaggctgcacacttaggcaagaatgtgaacatgctagagtttgcacaagtgggatgggctgttcctgtggaggtgttcaggagaaagaaggttctggctcatggagactgcatatacacagatactgggacagaactttcttcatgtctagccgtcatcccactaaaccatgagtctaatgtcctcagctgtaacccaaatcaccacaaggcaccaggaagcacacagctgcagtgtgcctgcacctaccaccctgctctttgcacacagcagctgagcagataggtagagttgagcagaaagacacccttgaccagcaagagttagaacattcaccttctgtcccaggcctgctagtctcatttatccacttagacactgctcagctgagaacctgcagtgtactatctctgagcatgccctctcatgtcattaatctgaggacagtcctttcaagcagacccttggagcagggattgctccaagagtgtggggagggtgccccctggggatagtgacaaagctgatgggaaacctgagtctccagggactgctcagtggctggttccctcattcattggtcccctcattagcaatgcattctgtacccattgcagtcaccagggatgctacggtgaacaaagctggtgatttatcaacctaatgggacctaatatgcccaatgatgggtgagaaagacaagatagagaccacagagtggacccacttcagatgaaatggacagtctctctggaaggtgacactgaagttgaactctggggagagttttggcagaacaactgcgcatgttaaggtcctgagatagggaacattggagcactgatggtcttatcctacagtatctgaatttaagaaacaagaaccaaagagagccagacttaactctgaagtgcacaggatgcatggattcaccaccaaagaaagggtccttgtcatttagtcatttgtgcaatatgtgtctgcagcctgctgtatgggaggcagtacttaccacagggggctcagcaggagccgagcccctgtggttccttcagggctgttgtttagaaggtgaatggaaacatccggagctatgtatgggctgtggtggagggacagaccccaaaggaagatgtgactcaccctccttggagagatcaaagacagccttgacacttgaacttcagtttgaagacccagtaggaggctgacagtcagctaaggagcacagaaagttcccatggctgaaagaccaggtgtgagggatggaagtcaggtgaaggcaaactgttccacaaagccactgtgaatgtctggtgtgtctggagccagagcaagcagggaaggagcaaatggggatgggcactaggcttttctcagcaagtcgaggtgggactgttggaatgatgtggagggagagggctggaggataaagccagaggtcaaagcccatgaagaacatcagcaggtgggacagttcacgcctgggggacctagaagccctcccttctggttcccccttgggaagtccctgagcagatacacttctccttctggtgacctgctggctcttgtgcgaggctcttgtggggagtccctctgtgcctgcctcatttcttgtctgtcccgttaggagagggacattttactttcaaaagctccacagtctttcactttcaaccctgtggctcccacctggcctatactgaggtgaccatagcctggatggatcaagtagattccactccttgatcattagtgggggcaaggtgggaaagccaagaatgcatggttgcccaaggagataggtagaatgtatcctgtgaatacacttggataggtctggttagatccacaaggggacgttgctccttgtcatagaaccttgaggtagaggtgctgggacccatgtggcacatttcaaagaagccacatcagttcatgcctctactctgtgtagagaaaccctaacaaggacttccctgcattcagaattgtcttttctgtcttgtgtgttgaacagcgtgctatgcacgtgtggagaccagaggtcactcactgctgagtgtcttcctccattactctccatcttgtttgtgagacagggtctctcactgaaccgggagctcaccatggggcctgggctggcagccactctatgcctcccaacacagggttgcaatgcacagtaccattgctggctcctagatggatgctggggacctgaactctggtccttgcacttgtttagcaagcactgtactccatgagccatttcatctctcctcttgatggacaaaatttcttaatgaaatccactatatcccttttttcccctttcattcctgagttagaagtatgttcaggaagtgtggctggcgacaaggtcaggagaacatcatctcacttttcttcgggatcatttattattttactttttttatagtatgtcctaaattgatttttattttctgacaggactgagtgattgaaggtaggggcttcgcgcatgccaggcaagttctctactcttgaactatggccccgggcccaggaattgacttcgatttgatttgaatttgatttgatttgaatttgactgtgtgaagtagggatcaagggttacgttatttgtatgattatgccacctttgttgggttttgttgttgttgtttttgttgttgtttttggttttgttttttttttttaatttgttcctttgtttgagacagaacctctcactgtaaccctcattgtcctggagtttgccacatagaccagactagccttgaactcacagagattctcctgcctctgcctccctggtactggtattaaaagcagtgccaccacacctgcctttgctactgttttgaaatggtagtcttattatgtagctcaggctaacctagaaattcctattctcctgcctcagtttccccaagtataggtcttataggtagcataaagccccatggcagctctgccatcattttaaatgccaggcctcctccctcaccccccaaatgcaagggcgattttgttgacagaccagcagttataagctagctactttgtagcatctctttctttcccatccaacagtttggtttccttgtagcaattctttatgttcatcacttctttaaatgatgccacaaatactgaaataatcccaggaaagcagctggagactgtgcatactgaaacttccttggaacctctcatcatccatgaacatggtctatctggccacttattttttatttctcttagtcatctttgtgattctgacaccctttgagccattcttgggtgactgtccttttgttgctaatataagttacatcattttgaagtttttattacatttttatttacctatttgaggctgtatgtgtaacatatggtgtatgtgaaggacagaggcaactttaaacagttgattctctcgtaccttgttagtctgtcttaggggctctagctgagatgaaacaagagcaacttgtaggagagaggatttatttatttatgtatttttaaagattcatttattttatgtatattagtacactgtcactctctttagacaccagaagagggcatcaggccacattatagatggttgtgaaccaccatatggttgctgggaattgaactcaggacctctggaagagcagccagtgctcttaagtactgagctatctctccagcccagggaaaggatttattttaccttatagcttgtagtttatcatccagggaagttagaggaactcaaggcaggaccctggaggcaggaactgatgtagaggccatggaggagtgcagcttactggctttgatccaactggtagctgctgctgtccttggtaggcatcccatggtcctggcatctcaaaaatgttggggtctccactctaactggtctgcactttcaccaatagtgtcttctagctttcttcagggattttgatcctgccacaaggccccatacctcagcttctctccatgacctccacataccttcagatccaatatcaccaggagaactcatacacattaccaacttcagctgccagcctgaggtttcagacttaggcatctgtgtacagactctggggaaacatttcctacaagatttcacttcaatgactctggtgtcttcttttctttctgtttagtttttgttcgctcattttgagacatggtctctctgggtagtcttggctgtcctggaactcactcagcagaccaggttggccttgaactctgcctgcctctgcctcccaagcactgagattaaaggcgtgcgccaccactacctgcctgctatatcttcttaatcacaggcaatccccagctgaccagaaccacagattcttcattgaaaatattgaaatgcttcagctgagtctttcagggactctcagacttccttttgagctccacaaggcaagcctccactatcttccacgttcccataactcattaagctctggccaatcaatggcttttccagcccaacgttcaagagtttttccacaatcctccctccgtgccataaatagatagacaaataaataaatacatacatacatacatacataaatacataaataaatacataaataaatagataaatagatagataaataacttcgataaataacagcaataacctataaccaggtaccaatttctgtcttaggatttctattgctgggacaagaaaccactatcaagagcaacttggggaggaaggggtttgttttagcttatatgtcttaggtcatgctcccaaaatgagggaagccagagtaggaacccaggaagaagccattaaggaatgctgcttactggcttgatcctcctggcttgctcagtttgctttctcgtaccacctaggactacctgtccaggggtgcctccctcactgtgcctgggcccacccacattacccaccagtcaagaacatgccaccctgcagacttgcctacaggcaatctggatagaggcatcttcttaattgaggtcattgagacactagtcagataaaactagctagtgtcaagtcgacaaaaatatcaaccaaaagccccaaactagtcagcccaggctctcagggatcaaactcaggtggtccggcttggcagcaaataccttacctgttgagccatcccaccagcctaaatggcagtttcatattccccttggtatatgggaataggcttttgtacattttatcattagtaccatacttcacaagctgaagttccagatgtaagaagaaatagctgactataaaagtagttcatcacttcaccacgtccagccaagctgctctcttccctctctcctccccttccttccatctgtcttttctttttctcctttaaatgttaaataaagtcacataatgaccacaggctgacctgagggccaggactgcaggttgatgttcagaggtgttctctctctctctctctctctctctctcccttttttctttgtttttaaatgttgtctgggtcaataaccttccagattggcctgaaatacatggcatcctcctgcctctgcctcctgaaagctgggtcacaggtgagagtctacatagcttgcctttgcttttatgatgattttaatttcttgtttaaaaaaaaagttgtatcaaaagatggactagtcggccatcactggaaagaaaggcccattggacttgcaaactttatatgccccagtacaggggaatgccagggccaaaaagtgggagtgagtgggtaggggagtgggggacttttgggatagcattggaaatgtaaatgaggaaaatacctataatttatatatatatatatatatatatatatatatatatatatatatatatgaaagagttgtggtactaagcagagttccaggcttggggttcagtgtgtgtgtgtctgtgtgtgtctgtgtgtgcctgtgactgtgtgtctctgtgtgtgtatgtgtgtgtatatctgtgtgtctgtatatgtgtatatctttgtgtttgtctctgtgtgtgtgtctgtgtgtgttgtgcatgcattnnnnnnnnnnnnnnnnnnnnnnnnnnnnnnnnnnnnnnnnnnnnnnnnnnnnnnnnnnnnnnnnnnnnnnnnnnnnnnnnnnnnnnnnnnnnnnnnnnnnnnnnnnnnnnnnnnnnnnnnnnnnnnnnnnnnnnnnnnnnnnnnnnnnnnnnnnnnnnnnnnnnnnnnnnnnnnnnnnnnnnnnnnnnnnnnnnnnnnnnnnnnnnnnnnnnnnnnnnnnnnnnnnnnnnnnnnnnnnnnnnnnnnnnnnnnnnnnnnnnggcctctctttccagtgatggccgactaggccatcttttgatacatatgcagctagagtcaagagctccggggtactggttagttcataatgttgttgcacctacagggttgcagatctctttagctccttggatactttctctagctcctccattgggggcgctgtgctccatccaatagctgactgtgagcatctacttatgtgtttgctaggcctcggcctagtttcacaagagacagctatatcagggtcctttcagcaaaatcttgctagtgtatgcaatggtgtcatcgtttagaggctaattatgggatggatctctggatatggcagtctctagatggtccatccttttgtctcagctccaaactttgtctctgtaactccttccatgggtgattgtttccaattctaagaaggggcaaagtgtccacactttggtcttctttcttcttcagtttcatgtgttttgcaaattgtatcttatatctcgggtatactaagtttctgggctaatattcacttatcagtgagtacatatcatttgagttcttttgtgattgtgttacctcactcaggatgatgccctccaggtccatccatttggctaggaatttcataaattcattctttttaatagctgagtagtactccattgtgtaaatgtaccacactttttgtatccattcctcaatgcaagtccccatgcttgggcagcaggcaccttactgaatgagctgtctgccacccctctgctgtcaccatcttaggtcagcacagtgctgctccagacagacacagcaagcagcagagttctagccctcctccacgctgctggagtgaagttccagatcgttcaaacagtaacgcctcatttctcctttgcagtcagctccctgtttctgagatggagtggatccaggcagcagttgccttcctgtgactgttttatttcacgtcttagcataatgacttcaagtttcacccacattgcaacatatgacaggagttccttctttctaaaaaggctgaatagccttccatttgtgcttagagcacattttgtcggtgaatggactaattgcttacacatgttgtttattgtaaatttcagggcagtaaacaggagtgtgaaaacacatcactgaattgtcgctttaacctactttgaatatatacctgctatttataattttaattgcatttttcacccttgtatgaccctactgaatatagagaagccttgcaacctcgccacatcttcaccaatatgtgtcactttattctagttttagacagtggtcattgtgtctggtgtaaggtaactctttcttagggcttcgattctgatttcccgataaacagtgatactgagatgcgtctttgtgtctgctggccattgtaagctcatttggagaaagggcactagtccgttttaacatggggccattcaggatgcagttactgagttgcagtgttcttttttatatgctgggtcctacgtgcttgtctgccatctagttgggggtgggggggcattcctctctagatgattgaagtttgtctggtcttgttttggttgcctgtgctctctccctgggacatctatagttttaggcctctagccatctcaagttcattcctgagagtggttaagatagaagaccagcccaatcctgacacacgacgctgtacctctccccagggtcatttctttgattatcttctttatttgtcccaagctgacttcaaacatgctcggtagcctaggatgacctgcaactcctgatgctcccacgtccacctccaaaatgctgggattacattcatgtacattgcttcttgaagtccagtccttctgctagggtggtcctggtgacctcacagactatttgatcatctcctgcgggcttgtttgagggacctttattctttaccattgcgctccatgtttgtatttatcccagaaccaattacaatcgtgacttaggttttctcaaagacttatttacttttattttatgtatatgggtgtttgcctgcatgcatttcgatgcatgagagtggagtgtctgtggaatccagaagaggacataggatcccatgtgactagagtcgcagagggttgtgagaccccatgagggtcctgtgaagaacagccagtgttcttaacctctgagctccctctctagcccattgatcactgtaatttaaaacccagaaagagctagagagcttttcttcctcttctctggattgccggcttttcaggatccttttcaagatccttcaagaccctgtttgaattctaggatgacatttgctattcctacacaaagcactattggtgttgtgggaaaaaattacttaactttatagttagttactctgttgcctttcatcccacaaaaggatatcttttatttagtgtctttctcaatttctttcagtgtgttacatttctccaagtaaagtgttttattgttttgatgctactataaatggaagtgtcttatttgtttttattttaaggtttttttgggggggggttgttttgttttgttttgttttcaagacagggtttctctgtgtagccctgctgtcctggaactcactctgtagatcaggctggcctcgaactcagaaatccatctgcctctgcctcccaagtgctgggattaaaggtgtgcgccaccacgcccgacttattttaaggttttattatctttaattatgtacaggcctgtgtctgcatgtggacaggtgcacacgcgttcaggagtctaaggagtccagaggcattgggtccctgggtccctggagctgcaggtggttgtgagccctctgctgtgggtgctgagaatgtagggtctgggaaggcagcaaatgctcttcgccactgagccatctttccagccccttaacttcccacttgattaatgtttgtggatataaaatacaaccaatatttatatcttaatattgtattcttcaatcttatgggattcttgtcttcaatttaacttttctcagtgtggaatcttcaggattttctttacatattatctgcaaacagagataactttgcttctttctttttatgtgccccttatttctcctcgttcctaactgtcccggctaagacttccagttaaacagaaatggcaagcgtgagtccttgccttgtttccgatctcagagtaagcttgtttgttttagtgtgagctttcatgtgtgcctttgtcatgttgtgatgggctctatttctggcatgtcttggacttttctagggcttggtctttatgtcatcgcagacacttagttttctaatcctcatgaggcttttgttgctactaagctgtgttgaatagaaccgttatcaaaatagaagttcttggatttttttttcctatcttcagggtggaaacatggtcaatatttgagttgggcatgttggcacacctctgtaatctcagcactcaagaggctgaggcagggggatagagagcttgaggctattttaggaacattgcaagattctaactcaagaaaaaaataccttgggtaatttggccattaaggacactgcttgctgttcagactgtttgtgtgtgcgcccttatcagagtaaaggacattcctctgtccctgcaatagagggattttatttttttgatgggctctcaaaaccacgaatggatctctcaatccattaaatatattttctgaacctattaaatagtcagataaaattgtcctttcttttgtaaatggcataaaatagacgcccaaagctatgttctgtattgacataaatggcgtgaagacagcgttaaccacttttgcatcattatatctgaacgggagctttctgttaggacctttgcacttcacttgtgtaaaagatgcactcttttttcatgtggatggttgacatcgtggttggtttaccttccagcctaattcatttacagttaatggaagtgctcctgtgcttgggattaagcctgtgaaagcaagtgccttggtgttctctgtcgttttgatttttgttttcatgtactcttgttccctcttccctttttatatgctccactcttgaacatggctgctactctcagaggctgttggggaaagcctgcaggcctggctgcacaggacgtgggccatcctgggctatggaacaaacaatacctcccatcttttaaaaaagaaaaagaaaaactactgctctgtgttttctattatcttgtttgttgctcctttatataatggtgtgcgtctctgcaagaccttaaaggatattttgttagatataaaattatacatttaaattaaaaattttcagcctttaaagcttttattctattgcttcctatcttctttttttaaagatatttatccatttatttattcgtttattcatttatctagtatatgtgaatacactgtagctgtcttcagacatcctagaagagggcatcagatcccattacagatggttgtgagcctccatgtggttgctgggaattgaactcaggacctctggaagagcagtcggtgctcttaactactgagccatctctccagcccgcttcctatcttctttatttctgtgttagtcagatgttagtcatattatgccctctttgaaggaaaattatttttcctctgtagtactttcaatgtccctttgtcatcatcattatcattagttttttgataaagttttttttttttctgtgtagccctgactgtcctggaactcactctgtagaccaggctgtcctggaactaagagatctgcctgcctctgccctctgagtgctgggattaaaggtgtgtggtacctttaatctttgtctttaattttaaatatagttgttctagagatctggcaggaaaatttatcgggggggggggggaggctggtgcagagacatcagtccattatgatgggaagcgtcccaaagaacagagtagttctggcatggtggccaggaagcagagaaaagggacggacagaggatgcaggaaggggacagggcaagggacttcctgagacataattcccttaactgactcccttcacgccacctcctactttgtgctgttgccccgggctcaccttgttggtcacaggctctgtacgtagctccctattacattaacagcactctaggcgctgtgaatgaagacgtggcacctttgaatgaagctgatgctttctggatagctttttcatttccttctaaatagaagcatctgctgagacagctgattgtaagcttctcgtatgctggtgagtgtgggcatggcatggctggctttgagggaagtcgctgtcctcgttcattaggtcacacacaactgtttccagaccacttgggtcatcatctctccctggctgtgaatagcaatttctgtgtatcagactctgaccaatctgataaaacatccgtggtaagcccttgtggttttatttgtatttctttgctccctaagagctcttagaattctctggggccttcatttgctccctttaaccttctccacttccctatgagttactgaaatacggttagctactagtctgctttatcccaacccagccctggggcctgataaacactctgatacatccccatgcaataatgcattcagcactcacaaccaacttcagcaaaggcctttgacccacactgatagtggaaaacacagaatcagagaggctaggtaatttgcccaaggacacacagctgggatgtagcagacttcaggccctctgcttcccactggaaagaggatgcagaaactcttggaatacctcctacctttctaatgagcctcatgtgcatcctaggaggaagtcagggtaaagagaccagcatgaccagaagacccctttgggtgccaagagaatggggagggagtgatggggacaccttcagcaccaacgtcgttcttcccttggtgcagcagcccttaagtgtgttctcagatcccagagcaagagtgtgaaaaagctgtcagtgcagagggccagcatctccatttgggggcagcccatcttcaacacttctgatacatctgccccccacttttaaagataaacagagaggaccgatccccaactcctggagtatcaagaaggtggcatgactgggttttgttttgttttgttttctgtcagctgttatatctcacagtggcgggctagcttttcagcaaaaaacaaaacaaacaaacaaaacaaaaaacaacaaaaaacctgatttgtgatttgcttaagaaacttttatgtgggcccatgagatggttcagtaggtagaggtgcttagctgggtgacctgagttcagtatctgggatccacacaatggaaggagagaaccaactcttgcaggttgtcatctgacctccttatgtgagctgtggcacacacacacacacacacacacacacacacacagtgtaattaaaacaggaacatgtaacatataccctgtgcctatgactgttgcaggtgtttataagcaccaagttaatttcccaagggctctgacagaatggtaccttgatcatcggtacttacaggtgaaggtctgggactcagaacagttaagccatctgcctgaaatcacacagcctggatctgaactgaggctgtgccagctccatagtgtgcttacccagcatgctgcccactgcctctctgtttcgtcctgttagctgtcgatgctaataacgcagtattatcttttgacacaagcttgttagagtaaaacgatggtcagcaagttaaagatagtaagtagaatagcgccatgtaaaccctgaaggtggtaagtgaatggtggcggttctagaacgttctagcccagccagctagagtagatggaccacagagctggcatgttaggatagcgagggctgtgattcagggagaggactcagcgtgcacggaggcagcaaggcactgggactgtggtgttcgggatagagtgactgtgctgcttaggtttgtgtcaacttgacccaagctagagtcatttggaaagagaaaaaccttaatgtatagaacgcctctgtcagattgactgtaggcagcctgtaggacattttattgattaatgtttgatgtgggagggcgcaacccaccatgggtagtgtcacccctgggcaggtggtcctgggttataaaagaaagaaggctgggcaagccatggaggagcaagccagtaagcagcatccctccatggcctctgcatcagcttctgcctccaagttcctgccctaactgtgttcagtggtggagtgtgacccgagagttgtcaactgaaatacaccctttctctacgagttgcttatggtcctggtgtttatcacagcaccagaaaaaaaaggagaacagcaggagtgggtgtggcttacaccggatacccgtcctgccactggctgctctcagctctgaggttcaggggtagaatgtattcatgtcaaagatggcaactgaggccctggtcatccacaaaaagatcagaggtcagctgaatactgggtccctcctcctctttgctatgccaggaaaaagcacacagaaatataactaacacagtataggggggataggggtctttgggctcatgtaaatgaaaggtttacatgtgggcatcagatataacctaattcatgttcttaatgtagccctgctgttgtggctcgaatctgaagtgtctcctataggctcatgtgtttaaatgcttgttcctacgattggggacggagcctggatgaaggaagtaggtctctgggggcgggcctttgagggtgatacccaccctgtttcctgccttgctccctgcttggtgggccatcacgatgggaatggcctctgccaagcacctgtatcaccactctaccacaccttcctgttgggacaggctgaacccctgaaatcatgagccaaggtacaactctaagagacaaccaaaggtgtctgcaggtttctgataggcgcccagaaaagcatcaatatcaggaatctacagatgaggccaggctgtctgccacttgcttccctgagcttgtgtcttgctgggcctggttctgtgccttgtctgtggaccatgcagaggggctgcagctgagagagcccaccgtgaggagggctgccaattcaggcagacagagcagctgatgtctgtctgtggcttgtgtagagctgtggtgtggagtggaagagcggaggctcctgacaaaggacggaagggtatccactttccctctggctgaggttcgacacagagttctgctctgctgggatgtctgtcgcaggtgtgacaccttagagaggagcaggcttggagcaagcctcctatggtcagagctcacctcttcagagtgtcatatcaggggtgggggagggggctttgctcagtctggtgctgcaccaaagcaccggaccctggcaagtgagaaggatgtttattcagctgagggtctagcatctggggagccagggccatggccactatcacagcctggtagggagctgtacaaggaggcacagctgatgcgccagtttggatctctcttcctttcctcccatgtcctccctgcttgcctttcttttccaatgctgggggcagaaaccagggactcatatatgtttaggcaaatactggaataccgagttccattcctgccatgatgtattcaaaactcactaatgccatcacgggctctgccttcatgacctcagctaatcccgattccctccattctattaaagtatggtctgggtgttaggtttctaacacacaaagttttttttgggggggtgtgtgtgacacaaaccataccacagggcttgtgaaggtgggggccacccaagatcagggttactcaaagcaggttaactgacattttccataatttttttattctaattctgatgttatagtaacgactataattacaatagttataaggctgaagcaggaagttcagaaggtcatgatcagtcttggttacatagttaagactctgtctcaagaagacaggggtggaaaggaagaaaatacacccctgtggaaaaagtgtacaccacgagtgtgaatttttagaatggggttggaataaaattaagcatttatagaaaaacagtaaataagtaattttgaaagtgaagcattttggaagccccttgggcacagcgttcctggttgttctgttccagaactttctggactctgttctagctcagtcagccccgcacatgctgtgtgtcagagcctatgcccagctttctctacacaaagctctagacaggccttcattgcttcattttatgaggcccagagatagcaagagactggcctggggccacacagctggccttctgaaccttggtcatttacactgcttctttgatgatggtctggtaggctactcaatgctgctggatttgggggaagcccggatgaaatgtagtcttatggtgaggtctgggatagtgtctgacctgacccatgcgtaggctaccttccttcaaggccctggtccttgctccacagtagaagagctggactgcacgagactcctgagcaggtggtctccctgagctagcacttctataggcaaagggcaggaggagcctggtgttgtccacctatggttacccttctgcccacagcatcattacccccttgattctacaggggccctgtctatctcagccagtcaggggctctcagcaactttgtgtggtgccctggctttcctagtgtgccactgtgggctaccccgggcttcctgttctaataagaatacctcctaggtcccccatgggctaacctcatctttggtactcaacaggggtcttctttatgagcttcggaccagctcttttgatgtggcagggactgaccctgggtggggaagccactcagtgcatgaccccagctggttcaccacatataccacatacttttcttgcaggtctgggacacagcatgccccggggcccagtggctgccttactcctgctgattctccatggaggtaagcctcagtaccatgactgcaggatggatggaggccatctcctcccacaaagctcagctgggcccacatgatgttgtaggctcctggtcatgtcatggctgctggccaacaacccacaatccacagcctctgtctatttgaccctaaaactgaatgcctcatttccaaagagctccagtaaacagaaaagctctccaccatcatgggaaggaagtcatacccttggtctaacctccattcctctttgtgcaagactcttactcaggtcatgaaccctcagtaggctggaggagaagggaggtggagatagagaagccagaattctgttggcagtccctgaggaaaggcgtcagaactgcaggccaagagtcctgtttagggcactctccccaaagccaagagtccagaagtgctcttcctcaagagctaggagatgagaggctgtttagactgcccagggcgaggggaacttgactccctgcaggatcagcaccatttgctctgggttttaccgaaatatccagtactttagttcccttaggaaacaggcgtgactcttgatttccctttctgtttgcgacaccctgcctgctctggaaacccctgtcattcctgagtcagggagaggaggttggggggctgggtatcaggcacttgtcacaaagactagaatgtcatctcctgctcttcctgtggagcctggctgtgttgccatcagtggaaagacagaggttcagggagaacacagaccctgcggccaccctgtgggtggctgcctgactcttaggtctgcctttgtctcatggcactaagacaaaatataaggagcttggataggatgatggctttggtgatgtgcttgtcattccagcatcaggacccatggaagggacctagtgcagctgagcatacttgcatggggtgtggggggggtggtggaagcagatcccaggggcatgctggtcaggctgctcagctaaatcagtgagttgcaggctgggcgagagagcctatctcaacaaacaaggttgagaaagactgagaaagacccctgtctgcaacttgcatgtgtgcatgcatgtgcaggagcctacacacagggtcaaatgtctatctttcgcagcctgggtgctcagacactctatgcctggaaaagtccagcatctagttccggtgtggtgctgaccctcttgttttcttgatgggagacaggatctgggcagacagaagtctggtccctccagccacttgtaacaccactaggcccccttaggagcttggtctggggactctattgctgtggaggccccgcctcctcacatgctcagtggcctgagcatttgatggggcacacacattctaattttaccagggccccaggtacctgttgtgctgctattagttcattcatttattcattcatttttgagctttggagacaaggttttggtctgtagttgtaatcctcctgcctcagcttgctgctatgtcaattctatgttatttttatttcatagtcagatacttttcctttccctttaagacaggatctggctgtgtagcccaggctggtcttaaattgggaatccacctgcctctgttccccaaatgcttgggaaggcagatgtgtcccatgcctgctctactgtcatttgcaaaggaaacaaatggnnnnnnnnnnnnnnnnnnnnnnnnnnnnnnnnnnnnnnnnnnnnnnnnnnnnnnnnnnnnnnnnnnnnnnnnnnnnnnnnnnnnnnnnnnnnnnnnnnnnnnnnnnnnnnnnnnnnnnnnnnnnnnnnnnnnnnnnnnnnnnnnnnnnnnnnnnnnnnnnnnnnnnnnnngggagaggtggctcttccagcctagtgcctgctgcagcattcaacctggtagccatgctgtcatcagcagcgacacagttaacttttctacaaactctgaagtcttctccactctttcaccggcttccctaacccctcccctcctggaagaggctacaagctcatgtccctgtgccacttgccctgacctgggggatttatttgttctctgcctatagtggattcaaagtgttttaccctatgagggacagtggtcttagaaccaaatatcgagcccagtttcacattaaaagagcctcatcaccatgactactcttgaaatgttgggactcacacaaaaacttctagatgacaagagtccccgtgtcccaggctttcatcccagcctgtgactctgcccaagcttgtcctcagcctcacacaacctgccaaggcctttcccctgtgtctcacccacaagggcctctctgttatcccgccagcttggagctgcctggacctcacttgctacactgactacctctggaccatcacctgtgtcctggagacacggagccccaaccccagcatactcagtctcacctggtgagtagccacgcctccaggccctgaggagctgctcagagaagatgacaggatgtggaggggctgcctactgagcccagggctgagctaacctgtggcatgctctgtgggaagcttagctacaagcaagggcccgccccttccaccagcaatgtcaatcactgggattatgagctgggagccaggtccccaccttacagatgaccaagctcacaggactcacttggatcacacaaatgggaggctgtagtctgacttgctttccctcatagaccttcctgggttggtagccctgggatggacagttcccagtgaccttctaagcactgagtaggcactgtgtcctcaccatgaataatttttaaattattgctaccatgttccagtcgaggatactgaatttcagtgaggtttagccactggcccagattctcatagccagtgtactcacaatcccacacgatgttttaggatacacaccacttgtccttcaggcgttcacccactttaaacaaggtttttgccagatgtgctgtaggggctgaggatcaaaacaagactcgatactgcagggtgggggagtcagggatgctcagctgggttggccagggcattcatgccagcaggcacagcacgtgcaaaggtcacgggtgagcaaacgccacgagtgtcagctcttgcttccagtgccacctgactgtgacctgagcagagtgagccagagtgaggggaaatagaagacacagatggtggtggttgtgcagcagccgtctgggctgcatggagaagggcagctggggtcagggagctttgaaggcccctctggctgctacactgagagtgttggagttcagagatagcggaggagggagcaataccttcagacagccgttacagggcttgaggctggaggctcgcttggaggagattgttcagcaaggtttgaattacaagaaattcagtgaagaactaagtaaagtggcagattggtcctggagggtgggtggtcacgttcaggaaggaagaaaatatacctccgaggacttctatatgtactctaaaacccatccttttttgcccagtgagacttaaagagccaaagcattcctcactgtcccatctgaccaatgtccctggaagatctctcagagcagagaactactaagccttactcccctctaagcacagagctgtggctgtgccgtggtggagggtgggaaggagcgaaagccagcccggggtttcctatagctcagcagtcccaaagctgagagctgctgccctgggcaagatagtgagtgtctggtcctctgaagtacgcaagctgtgtctggctggactcagagcatgctgggtgccgtagggaggggactgtccctgtgagaggggctgcttggaccatgaccctgagccctacctccagcccttctcagttcaagctttgctttactgtcctgccccaggcactgagctccactgtccccagccccatgactgtctactctgtccccaaaggcaagatgaatatgaggaacttcaggaccaagagaccttctgcagcctacacaggtctggccacaacaccacacatatatggtacacgtgccatatgcgcttgtctcaattcctgtccgatgaagttttcattgtcaatgtgacggaccagtctggcaacaactcccaagagtgtggcagctttgtcctggctgagagcagtaagtaccatgagcccgaagcagagaggacctaggacctttctctgacctcagagcaagctcttctcactcggccaaaatctactctctttggtgtgtccttttgagatgcacagctcaggtgtgatgttttgatacgagatttgggctaaatggccatggagagccttagaggcttggaaaggtgtagggcaaggactccactcagccctccatctctgcctgaccctgaacaaggtttaccttgtaaagaccctttaaacatgacccctaggattttgctcctagtatgagcatcagtcagctaacatgaaatccttgcagctagatgagaggggcctaaagttaggaaggccccaggatggacctggctatagctgtcacggagcccaggctgggcaaaggagggatctggggcaggcagtggctttggcgcatggcagcatgtgtatctatagatacatatacatgtatgagtattatatgtttatatgtatgcatctctgtgtggtatggggccccttctttaggagagaaatcgaaagcaacagaatccagtaggtgccttgcttaggacgtttctgcattaggcactaatattaaactctaagaaactcccatcagccatctggagtcccagcttttgagggtttgtttttctctttccactaagaaaggacagaggatcttggtctgtatgcttgtccccagctgggctgggctgagcctgagtcctgactctgcctttaagcctgggagtccttctccactatccccagtcctaggtctctgtttcagtcacctgcctgcagtgatgagatctagtccaaacgagcaggggctgtggccagggagtgctttgttccaagtcagccagcggcctttagacactgtcgggagggagggactctgctgcctgcagagtcttaccctgttccatctttctgggtcttcctccaagtcaaaccagctccccccttgaacgtgactgtggccttctcaggacgctatgatatctcctgggactcagcttatgacgaaccctccaactacgtgctgaggggcaagctacaatatgagctgcagtatcggaacctcagagacccctatgctgtggtgaggtggctgggctttggggtgggagctacaggggtatccaggcaggtcccagtgtagtggcacaaggaacagggcttagcattccctccctgcatgcaaccctctccttccttctccctgggtcgaagaacccctcagaacatctccacctggactacttccttacagtccacctcagttacagtggggcgagtttgggaacatcccacttacttggaatgtgaaggctacttgagagtgcacagctggaagtttccaggatggcccactgtttagacagagcgagaatggtcctggttgaagatttccataaaggacatcatctagaatgttcccaaggagacatttatagccatccattggcaagatggctgtaactagggacttcccaaaaggtctactgttaatgtcctatgtcatttgagacagggagttcaggggctcactgtctgtgaagtttctagttaaggacatatagaggtgtccatggttgctcccaagacattgatggttggtggtcaggctactgccacagagagggagctctagtcagggatgtgcgctccctgtgggggcctgcgtggtgtgaccccagtggaaggactctgtgctctactgatgacctgagtgactacagagtgtcctggttcttctgtcctggcagaggccggtgaccaagctgatctcagtggactcaagaaacgtctctcttctccctgaagagttccacaaagattctagctaccagctgcaggtgcgggcagcgcctcagccaggcacttcattcagggggacctggagtgagtggagtgaccccgtcatctttcagacccaggctgggggtaagtgtgatgctggtaggacaccccactcctggtactaaagctggtcctgctgctgcttcacaagccctgagattctcagcatggctgggaggtctgtgctcagttatacatccccagttgcaaccactcatcattgtgagggggttgcttcttctaatggtgcatttgactcctaactctgaagggaaagccattgccacattttatagaagaggaaactaaggcttggagagatggaattccagtcaaggtcacacttaactggaataagaatgaaatacctgatttaatcaatttaatagagtaaagggttattttagcttatggtttcagaaggtttggctcatgattgcaaagccctgttgcattgttggggggcttacatcatggtggtcaggacataaagaaggtgcaagggctgggatgccaataccccttcagtgtgtctctaatggcctaacctcctccaactagaccctgacttctaaatgtcccactaccttccagtaacataccaggctaggaccagaagcctttgggggaagggtcatttcatacccaaactccaaagggagggatcagaacccagcttccttccagccccccctgccccaccccaccatccccagcacacccacccatgttttctgggagacttttctgttggacccacggtttgctctctgtgcagagcccgaggcaggctgggaccctcacatgctgctgctcctggctgtcttgatcattgtcctggttttcatgggtctgaagatccacctgccttggaggtgaggccaggggctcagggaggcagagaaggggtcagcctgggtcacagtatctccaacctagacctactttggccaggggacgtggtgagagcactgatgctaatgaatagtgtgtgtgttccatgtgctagctagacactgtgcagaacttccaccccaggtccatggctaccctgtaaacttggcacactccaaatggagaaaactaaagcacagaacagtcaagccacttgcccaaagtcacacaatcatgaagtggcgagggtatggggtagaaactttgttctttgtggagacttcagttgtgactttgtccagcaaatgaactttgaggctgaggggatagtcacgcatcccctccccagccctctgttcagctggaaggtaggctgctgcgatctgcttttacatacaggcccgccgctctgcgtgccattgagagggccgggccaggctactgtgggcagagccctttgataaatgacagagtgagcctctgcacaccctgctgattgtcttcccctccaatgaggtgctcagacgggcacagagactctataaggggggtatcagggcagcagtgacagctgatggtgacagcctgggcttctctcagtcccaacccatcatggtggatgaggaggaagtcgaggccccagagggcagcgtgtgcccaggccacagcagatgacagaggcaggaacttgaacatctgcaggaagcttgggggtgagggtgactgtggcttccgtttaactgatgggtggcaggaaggagcctggcagtagaaattgttgcttctgcaggagaggggccagacctcctacttgctgccacaggggctttgcccactccttttctttgcaggctatggaaaaagatatgggcaccagtgcccacccctgagagtttcttccagcccctgtacagggagcacagcgggaacttcaaggtgagctactttggatacaccctctgggtcgtttgccctttgggaaaaccctaccaaccctcaccctaaccccaagaccactctgagcccagagcactctggtccatcctacctagaactagccctcagtttccctattctgcaaggtgtggggttgctcttagacttaaacatcatgatgtatttccaacttagagttaaggtgggcaaaccaggtggctctgggggcatgagctgggtgcctagggtttcctagggtggccttgttctgtggtgggaagcaagtcttacctgggaaggacttgtcctaccccacaatacatcccaagtacagctgccactactgtcattcatttcaaagtgtctgccagccctgatgcgcaaacccaacattggcagaaggcactgaagagagcatgtggtgtcaggatagggaacctgtagcacaccatggaggttagcactgtagagcacccaaggaacacctgctgtgcgcctggcctgcagcctgacctacagtcgatcctgctgtgggttcccagcaaccctgggtctctaggaggagatctagtctctagagtggccagtgggcatttcagagcaggccacacatcccttccttacccctgaagttcactcagcactgctgcctgctgtgtgctgttgctgctgatcttgtgtgacaagcactatcaacaaataaacattacttgacttaatcctcaagacactgggtcctttctgtagacatgtgaagtgacacagagagggcaagggtctagctcaagaccacacagctaaggagtgactccaggtcaggggtagagagatgtagtggttctgagatgttctacggggtgatctctgccaatgcagtagtctcttttattgtaagcaatatcctgcaggaccactgtctccagtccagcatccccaaaggcctttcaacacggctttttagtaattcattccatctataaacatttatggtacacctactgtgtgccaggtactgaggacacagttgtgatcagggctagtgtagacacacaagcaaaactagagacatccggaagtgtcaggagacggagtagaggctgggccacttagacctcaggctctccctgcacacgtcctcaagaccttaggacttaggaacctggtcccagcacccagctgttccttggctggggcactggtaactagcgtggatatgagacagaggacagtcagtccttactaaaggtgggaacacgggctctgagaacggacagtattgggaacccactgggcagggggttcacagacagacatcatggcgcgctctctctctctctctctctcctgttttcttgttcttctgctttccccgtctctggcttgtccctgtactcccccccccacccccatctttggctctctctgttcacacccgaccttgttgtccccagctcatgactgtgtgtttctttctcatagaaatgggttaatacccctttcacggcctccagcatagagttggtgccacagagttccacaacaacatcagccttacatctgtcattgtatccagccaaggagaagaagttcccggggctgccgggtctggaagagcaactggagtgtgatggaatgtctgagcctggtcactggtgcataatccccttggcagctggccaagcggtctcagcctacagtgaggagagagaccggccatatggtctggtgtccattgacacagtgactgtgggagatgcagagggcctgtgtgtctggccctgtagctgtgaggatgatggctatccagccatgaacctggatgctggccgagagtctggccctaattcagaggatctgctcttggtcacagaccctgcttttctgtcttgcggctgtgtctcaggtagtggtctcaggcttggaggctccccaggcagcctactggacaggttgaggctgtcatttgcaaaggaaggggactggacagcagacccaacctggagaactgggtccccaggagggggctctgagagtgaagcaggttccccccctggtctggacatggacacatttgacagtggctttgcaggttcagactgtggcagccccgtggagactgatgaaggaccccctcgaagctatctccgccagtgggtggtcaggacccctccacctgtggacagtggagcccagagcagctagcatataataaccagctatagtgagaagaggnnnnnnnnnnnnnnnnnnnnnnnnnnnnnnnnnnnnnnnnnnnnnnnnnnnnnnnnnnnnnnnnnnnnnnnnnnnnnnnnnnnnnnnnnnnnnnnnnnnnnnnnnnnnnnnnnnnnnnnnnnnnnnnnnnnnnnnnnnnnnnnnnnnnnnnnnnnnnnnnnnnnnnnnnnnnnnnnnnnnnnnnnnnnnnnnnnnnnnnnnnnnnnnnnnnnnnnnnnnnnnnnnnnnnnnnnnnnnnnnnnnnnnnnaccttgttccttaatttaataccattggttaaataaaattggctgcaaccaattactggagggattagaggtagggggcttttgagttacctgtttggagatggagaaggagagaggagagaccaagaggagaaggaggaaggagaggagaggagaggagaggagaggagaggagaggagaggagaggagaggagaggagaggagaggctgccgtgaggggagagggaccatgagcctgtggccaggagaaacagcaagtatctggggtacactggtgaggaggtggccaggccagcagttagaagagtagattaggggtgacctccagtatttgtcaaagccaattaaaataaccatagtggagtcttatttatttgtacgctagtcagggataagtttaaaattggttgtactacacatccatttgtgagcaatgcctctgcacgtccagtgttcactgtcaatgcctgtacgtgtgtgcctgggctcacgtgtgtatgcacgagtggagtgtaggtgtctcttagataggagcctctgactcttcccctgcggacatgtggggtggtcacactcagtgtcaagtgattggtccagattgctgcccctggggcactatcaccaagctcgaccctaccaggggccatctctaggacctatgaagtcctgactatcttttatcccattagaatgagaagatttttggggaacctagggatgtaagctgtaaaccccagctctggtggctccaggctatgcagcctggagaagccacttctgaattctatgctgactttacttgcctggacattaggaatgacgtaggtaccctggatcagctctatacagtctgcagccccattctgcttcctgtcttttgtggcttctaggatccaggtgcatactctggggtgcatactccaggtgtgtgtgtgtgtgtgtgtgtatacatatatatatatatatatatatatatatatatatatatatatatnnnnnnnnnnnnnnnnnnnnnnnnnnnnnnnnnnnnnnnnnnnnnnnnnnnnnnnnnnnnnnnnnnnnnnnnnnnnnnnnnnnnnnnnnnnnnnnnnnnnnnnnnnnnnnnnnnnnnnnnnnnnnnnnnnnnnnnnnnnnnnnnnnnnnnnnnnnnnnnnnnnnnnnnnnnnnnnnnnnnnnnnnnnnnnnnnnnnnnnnnnnnnnnnnnnnnnnnnnnnnnnnnnnnnnnnnnnnnnnnnnnnnnnnnnnnnnnnnnnnnnnnnnnnnnnnnnnnnnnnnnnnnnnnnnnnnnnnnnnnnnnnnnnnnnnnnnnnnnnnnnnnnnnnnnnnnnnnnnnnnnnnnnnnnnnnnnnnnnnnnnnnnnnnnnnnnnnnnnnnnnnnnnnnnnnnnnnnnnnnnnnnnnnnnnnnnnnnnnnnnnnnnnnnnnnnnnnnnnnnnnnnnnnnnnnnnnnnnnnnnnnnnnnnnnnnnnnnnnnnnnnnnnnnnnnnnaggaggaggaggaagaggaggaggaggaagaggaggaggaggaagaggaggaggaagaggaagaggaggaggattcttttaagtatccaggaagtatttataatacaaggcacagggagagggtacagagcacagtacctacagaaccccctgtatgacacccacagaggacaggggacccaaaggagccatcaagaagcagctctggttctgtagctagtacctgtgttccccctaccctcggtgccatgcttatcctaggttaggggaggttcccttgcatccaatgattcttttgagcacgatgttcgctgtgtgagggatgctaaggtatgctgggaggtattggagaactccttcccagtcaccaggatacagtaagagcgcgtgggtgctggaattgcttagaacttgctgttgttttcttctctccctccttcatttctgtttccctcttcccttcctttgtcgttctcttctcgaatggtctgttctccctgcaaggatgcacctgagaggtggggtggtatttgcaaaaccaggcaggatggaggcaacctggtgggaagcctccatagtggctgggattccggggtacagattctcccctcaatggcccaggaaaaaaggctgtctacctgtccagtctgcagagctggattggaaagaagttagcagccgcctgctcatttgcaaggcagggtagctggtggaatcaccaagggaatgcatgtatgtcctccgtatctgactgagggctggaaagttctggaacactggtagtttcgaaagtgagacagagcctaggaccagggtgcgagagagaagctcagagcagcaaaacccccagctctttcctgcacgtgcacacaaccccacccggtgcacccagacacttagaccaaagtgtgctgtggttttcacatactctgggagccacagactgcgggtgctcttggcagctctccagggaaccaactcagcccctcagcagggagcgctcctgacaggggtgtgggcaggaagaacattcagggctgaggccctggccctcaccagctccatttgaaggggcgcctctcgggaacaaacgtggatgtggaagttgaaggcaagagctggaccacctagtagtggatgaaaggatggcggaaggcttgagagaatggcggctggatgcagagacggagatactgcacaagagcagccgaccagatgcagccagtaaagctagttagttgctctgtctgctctcagttttacccccagccctacacacaacgggtgcttaataaagtattagcaaagcccgatggtagcctgtcttatttccaggacctcaggctccagagctagatgactgtagacatagtcggtgaggggcgtctctggctgggagaagccgaccagctgccgctgggtgcccagggcacaaacatgaggggaagtaggtagtgtttgtcagacacggggaaatgaatagggtgtgcagggtgcatctcttttccagtgagggcctacagcagccatggccaactgagggcagtgggtccctgtcacagaaggccagttagagtcgctattaagctgctctgaggggaagaaggcttcacaccacactgggcaagcacacatggccaatgcttgtccaggctttgcccatcttggctttgaggggctgggactatcccttgggtgggatgagctggacctgtctgagacctgtcaccaaagcaaccaaagaggcaaacctcgtaggaaacatacatgggtgtttgccactttgctagctctgggagacactagactcccctagcccgggctgctgcctagtcaaggcagatgtgtgacctgattggcttcatgttttagtttctctctgtggggatgctgcggctagaacccaggacctcacaggtgcagggtgtgtcctctaccactgagctatcatctctagactctcttacttttcctgttctgggtcagggactaagttgcccaggttagtcttgaaatcttggtcctctgctccagcttccaaatccccaggcctgtttcatcctttcctctggaattccatgtagatctactaggaggaatggagcctggggctgctgggagcctggggtgggggaacagttggcctggggtgaagacaatacagcagagctgagaggtagaaacctcggggctcctggatcaagccttgcctgactgaggtccctggtcattgtggcttccttctaggcatgtgaacttgccagccccatggggtcagaggacatgcaagcagaagcagaactttgtgactttctgatggagaactcacagggatcccagtcatcttcctgtgctgtgggcaccggtgggggctgctctggccaccggtggggactgctctagccaccggtgggggctgctctggccactagtggggactgctctagccaccggtgggggatgctctggccagctttggttctctctgcccgaggagaccaagttttctgaatgatgctggtatgaacagagttagaagtgaactcttggtcacttgctgccgcagagacgtgactgttacgaagcacacctcaccccatcctgactcaatggaccagttgatacctctctgatttgtaagctgtaagctggtttgaggtggattcctgtcgattgtggcagaaagtgccccagtattatcctaacaagttaaaatgaagacaactcctatcctaaggaccacagtgagaggagagggccgggcaggggcacggctcacagtacagaccttgtgtatcattcaaggtggtggtggtggtggtgggggaggaaagagtttctggcctcacactgagctgcctctgacagcaggtgttgggggtagtgtgtgtgtgtgtgtgtgtgtgtgtgtgtgtgtgtgttcctagcactccttccctgctctcccagaaagcacttgaaagcttccatcaattctgccaggaactcagcaacctgaccccagcatcccctgtgcattcccactgtgatgcggtctggggtctccagggtctcatgccagaaggagacaaaaaccacctctcacccttggaacagaagtgccagggagggactgcctgcccaaggccactaagccctctgcagctgtgctcctcttggcttccccagtggatgggaagatctggggacatggctgccacctagcaggcagcacaacccacaggacccactcagccccagacacacccaccacccggaagcaggaggagggctcctagggaatgaaggggcagttagtagctttgcctctttgtggcagcagctttttgtgtaggtgaaacaagaagtagaggccccctgatgacaaaccagagaggggacatgccctgaccagagcatgtgggtcacaatcaatgcctctggggatcacatatcagataccctgcgtatcagatatttatactacaattcctaacagtagcaagattacaattacaaagtagcaacaaaatcactttaaggctgggagggggggtcacctcaacatgaggagctgtattaaaaggtcgcagcattacgaaggttgggaaccagtgatctagagccatccaagtgctcaaaagtgtgaagggcagggtccggttttcacattgcctccgtgtgactaactgtggtgggagtcccttattcccagctgtagcacacgcctgcctggcttcgctccccaactaatgtggattaacaaaaccctccttggagtctggtaccatgcctgtccctattatgggggtggggcaaggactgaagttgctatgacggagcccagattgggggaggggggagggctccgaatagattctcagctatgaggagtgaatgaaggagtggcagagaggagggctgccctcacaggacctgcaaagacacagagagggggcagaggtcccaggaagcttgtgggcgtcagaactactcacccctgcagccccaaccatgtgacaacctgaggggcctgctcccgttagttggaagcttttctttcccaacttgatagtcctagatatgaacactagagctcttcagggagcatggtgctgactctccatcctttcacctcagtggcgtagaggaagcgctggccctgccactagcttccgactttgtagctgttttagcctcatggccttcagtttcctcatgcatgaaataggcacacgggtcatgtgtgcttcccggggctgctgtgacatcacttctctgtggggtccagatggtgtctgatgtacaagcaggtgctcacagtaatagcatttttactattaacaggaagtcacctgggcttgggaggttccacagcttgctgctgccccctgctgctgggcaggagtcagtgacagttttcctgctctcagtcatccagaggagagaacaatggacgcttgtgagatttgtggatgctaagcagaggacaaagtggccatttaattcagcaaggcctgaactctagcctccagcgaacgtggactgctttggggactgggagtgggtgggtgacacgcatgcacacacacattcacacagctggagaactggtgcagtcagagcccagggaaaggatggagagcagcgagggcagaagaggcactccactaaaggtcacacgcaagctgctctagtcctaggtagaggcagctgaaacggagaggactctgtaagccaagcaaggtttggagagggaaggggctgagcccccataacaagctggagggtgaaaaccctgcatgaaacacgtttcgggggtgggccatcagaaaccttgtgagcttgcttagtgggggcaagtgtaaactcgggctcagtgctggaggctgggcttgctgtcttgagtagccctgtgtatcccagggatattatggagggaaagtgagcatctttcacatcaaatggcacgaaggcctgtgtttcccagggtctgcccacatgtgtgtaaacacaaaaggtagtcaggtagaggcctgagccgtgtgccgttccatgtctaagagaaccatttgtgtgttgtttactgatgaaagaaatggaaagaaagaagaggagcagactgtgggtaggcacaggacagagtgcacagccgaggacacgctgtcctgtgcagtgtggcaggcccagtgccagctcccacggtccttggatggggcagaactgaatcctgggatgcacagcagcccaggatggcctctctgtggagtctttgttaccatttcctctaaagctggcactctcagcagcacctggtttctaactggaggcctcctgccttaccccgggctctctggagtcctcttgacccagcagtatgctggggtttcgggagatctttgtgcggagtttggaagggctgctgatgctgtttggttagttggtgggtggtcaggcagatgggtgaaggctgagtggacggcagctcaggtggagaaagctcaggtggagaaggcttatactgaggactggtggctgtaacaaagacgggaaggggctttggggatgacaaccatccacgtaagccttgactctgcttgggctgtaccctgagtccccatgtcccctcagcaaatggtccatgcattaggaagcttggggaagagggatattggtgggctctgtgtccatgcttggtgtccttcagttccttgaggccttccatcgccgctgtgcaaaggaggctctgagactggagacagaacttggccgctggcttccagcctcctgggcagtgggtaacaggcaggctctgctcataaacacagcaccttcacggcccaaccgctctccagaacattaattaccgaggctttatactgtcaacactcacactgttgtagcttggccatgctgggtgccctgtcctgggtcatcttcaccccctttttataaggtgtggctcacattgacagagaggatgagataggttgaaagctgggtcaggccaccaagtgccagccttcagtagataggaaaggtgaacaggaaggggccggggactgaggctcaggccagctgtgttgagtggtctctgtgtatgaccccagactgtcattgcaagaccctaagactcgcttgcatttttcaacaaaaagatgaaaatctaaggttccccacccccactgcccccacaaggtgaagactccagaagggaagttcttgggaaacaacaatcattaggccaatacacaacgtacatttcatctcactttaattacaaaataaataaatacatgccaggggcctgtatctaatggaaagagagaaaaatgaaacaaaaacaaaagcaaaacctataggcctggcttctggcaggaggggtccccacgggagactggggctcagtccaggccaagttgggatgccctagagtaagaggagcagattctgtcaggtacccctgtgacgtgtcttcacaaagcccttcctagagtctgaatggtgtggtgggtttcaggtgagtcagggcttggtcatcagctctgctccccaaacaacatccaccctgctgctgccactgctggagcctgagttcagggcaggacatgggcctgcaggaaggctgggcacctgggagcaagagcagcacgggtggaggggactcaagtcacctgctagttgctacacctgggctgggctgggctgggctggggccgcgctgtgggaacagctggggaggacagggctcatggacagtccaggtggagccgtgaagcagaggcttccctgctggcctggggcagcgtctataaatggatccacttgttccagttgatatcatgggggaagacacggcccagacggatggtacagtccagcgtgggctcatagaaggtgacagtgctctcgtggcaggagagcgcctcagcctcactggcctgacccaggccctccaccacaggcctggagaagagcgagacactcgctggcttcctcagagtccgcttctggatacagccgagggactccaggccctgcagatacagacaggtgggttacaaaggctctgcttgctcaggggtctggtgttgccgcacttatggaatgtacacagtgttcccaggcagaagatggccaaacatggccttgagggaggcagggcttagcaggaaggtttacatcaagatgggtaggagaaagtatggaaggtgtgggtgccacagtgacctctggaggagaggcactcttcagccaacaatggctgtggtggcttcccactaggaagttctgggaatgtcaccactaaatgtcaagttcctagtctgttaggaagctggagcccagaacaccatgggaatgagagctcagggcagccgctagcccaggctgggaagtagctgcttgtgcagaggtcacacagtcctcagctttcctcgccacctccatttatttacccaggattcctgaggacctgtgagcatgtgaccctgagtgcgagtcaggtggaaaacagcaggcagagtaagacagaccaagtgcaaacggacccaagggccagtgagcttgctgcagggctgagctgcagcaggcacaggagaagggaatcaagagccaggcagggcaaggatagtagcagacccctctgccaatggccagaaggcactgaaggttaagctgaggtggtgacacccgaggtgtgctccccccaccccaacacacagctgggctgagacgccctgggccctacccggagcagctcaaggacagcaacaggctgcaggacgccctggtagtactgcagcaggcagctctcgggaacgccgggccttgacatgatgtggtagagcacagcctccagcatgcctttgcacacgggcatgttcaggtgcccatccacacctcgccatgggcggccgacgaaacacactctctcacagccactggagacgggagaaggaggggacatacatgctggtcacagacagactactctggctcagggaggcccagagcttgggcactgtctgcccacggctctccctggcaggacaatccctggctaagtgcaagtaaagcctaaaccggaaccctccccactgtcactcagatgtccccacagcagctgcagctctgcctcgggcacaaagctgccactaacccagggctgatgggtcgaatggggcaggggtgggttttgctagctctggtggccatggctgaaatggaaggtccatttgtgccttgggagtcagatccagggtacaaagccttgctgggctctgtgggccctgcctggggagggcagaagagtgcaacccctctggcgtgctgtcgctcagctacaggactgaggggctgccctgggcaggcatacaggctggctgggaaggccctctcttcatctgcaatgggtctaaggacacagtgggctgtgggaggaggcccaggggagcgtcaaagcccttggctgggaacgtctgtttagggcaaactacccaggcttgcaccctacgcaggaacttctttcttacagtgactgacactcggtgggcatcttccactagcctgaaggctgatgccacactacttcatgctctgcccctccctgtgaaagattcccaattacctctcccacgctgcctgggccatgttactctctgtaaggcctgtaagagaggaaaaggtggcaggctcttagaagacaagtgggaggccatgtcctttgcctctctcccctcattcaatgggcaccaaagtagataagcagtgaccagaaggaatagccttctacccagaatatggtactgcggtagtgaggccaagagccctgaccacagggcgagtgtatataaaagttcttggcagcaacagcctata

SEQ ID NO: 301 - DNA, 2357 bp, Mus musculus
cagctgtctgcccacttctcctgtggtgtgcctcacggtcacttgcttgtctgaccgcaagtctgcccatccctggggcagccaactggcctcagcccgtgccccaggcgtgccctgtctctgtctggctgccccagccctactgtcttcctctgtgtaggctctgcccagatgcccggctggtcctcagcctcaggactatctcagcagtgactcccctgattctggacttgcacctgactgaactcctgcccacctcaaaccttcacctcccaccaccaccactccgagtcccgctgtgactcccacgcccaggagaccacccaagtgccccagcctaaagaatggctttctgagaaagaccctgaaggagtaggtctgggacacagcatgccccggggcccagtggctgccttactcctgctgattctccatggagcttggagctgcctggacctcacttgctacactgactacctctggaccatcacctgtgtcctggagacacggagccccaaccccagcatactcagtctcacctggcaagatgaatatgaggaacttcaggaccaagagaccttctgcagcctacacaggtctggccacaacaccacacatatatggtacacgtgccatatgcgcttgtctcaattcctgtccgatgaagttttcattgtcaatgtgacggaccagtctggcaacaactcccaagagtgtggcagctttgtcctggctgagagcatcaaaccagctccccccttgaacgtgactgtggccttctcaggacgctatgatatctcctgggactcagcttatgacgaaccctccaactacgtgctgaggggcaagctacaatatgagctgcagtatcggaacctcagagacccctatgctgtgaggccggtgaccaagctgatctcagtggactcaagaaacgtctctcttctccctgaagagttccacaaagattctagctaccagctgcaggtgcgggcagcgcctcagccaggcacttcattcagggggacctggagtgagtggagtgaccccgtcatctttcagacccaggctggggagcccgaggcaggctgggaccctcacatgctgctgctcctggctgtcttgatcattgtcctggttttcatgggtctgaagatccacctgccttggaggctatggaaaaagatatgggcaccagtgcccacccctgagagtttcttccagcccctgtacagggagcacagcgggaacttcaagaaatgggttaatacccctttcacggcctccagcatagagttggtgccacagagttccacaacaacatcagccttacatctgtcattgtatccagccaaggagaagaagttcccggggctgccgggtctggaagagcaactggagtgtgatggaatgtctgagcctggtcactggtgcataatccccttggcagctggccaagcggtctcagcctacagtgaggagagagaccggccatatggtctggtgtccattgacacagtgactgtgggagatgcagagggcctgtgtgtctggccctgtagctgtgaggatgatggctatccagccatgaacctggatgctggccgagagtctggccctaattcagaggatctgctcttggtcacagaccctgcttttctgtcttgcggctgtgtctcaggtagtggtctcaggcttggaggctccccaggcagcctactggacaggttgaggctgtcatttgcaaaggaaggggactggacagcagacccaacctggagaactgggtccccaggagggggctctgagagtgaagcaggttccccccctggtctggacatggacacatttgacagtggctttgcaggttcagactgtggcagccccgtggagactgatgaaggaccccctcgaagctatctccgccagtgggtggtcaggacccctccacctgtggacagtggagcccagagcagctagcatataataaccagctatagtgagaagaggaccttgttccttaatttaataccattggttaaataaaattggctgcaaccaattactggagggattagaggtagggggcttttgagttacctgtttggagatggagaaggagagaggagagaccaagaggagaaggaggaaggagaggagaggagaggagaggagaggagaggagaggagaggagaggagaggagaggagaggagaggctgccgtgaggggagagggaccatgagcctgtggccaggagaaacagcaagtatctggggtacactggtgaggaggtggccaggccagcagttagaagagtagattaggggtgacctccagtatttgtcaaagccaatt

SEQ ID NO: 302 - protein, 579 aa, Mus musculus
LNSCPPQTFTSHHHHSESRCDSHAQETTQVPQPKEWLSEKDPEGVGLGHSMPRGPVAALLLLILHGAWSCLDLTCYTDYLWTITCVLETRSPNPSILSLTWQDEYEELQDQETFCSLHRSGHNTTHIWYTCHMRLSQFLSDEVFIVNVTDQSGNNSQECGSFVLAESIKPAPPLNVTVAFSGRYDISWDSAYDEPSNYVLRGKLQYELQYRNLRDPYAVRPVTKLISVDSRNVSLLPEEFHKDSSYQLQVRAAPQPGTSFRGTWSEWSDPVIFQTQAGEPEAGWDPHMLLLLAVLIIVLVFMGLKIHLPWRLWKKIWAPVPTPESFFQPLYREHSGNFKKWVNTPFTASSIELVPQSSTTTSALHLSLYPAKEKKFPGLPGLEEQLECDGMSEPGHWCIIPLAAGQAVSAYSEERDRPYGLVSIDTVTVGDAEGLCVWPCSCEDDGYPAMNLDAGRESGPNSEDLLLVTDPAFLSCGCVSGSGLRLGGSPGSLLDRLRLSFAKEGDWTADPTWRTGSPGGGSESEAGSPPGLDMDTFDSGFAGSDCGSPVETDEGPPRSYLRQWVVRTPPPVDSGAQSS

SEQ ID NO: 303 - DNA, 68815 bp, Homo sapiens
caggaacacccagcccattcacgggggaaaaatggatagaaaatgtccctaaaaaagtccagacattggagctgctagacaaagacattaaatcaattgtcttaaatatgctcaaaaagctaaaggaaaccatgagtgaagaactaagttaaaccagaactatgtgtgaacaagtagataatatcaataagagctagacattatttaaaataaccaaatagaaattttggacctgaaaaatataatagccaaaatgaaaaatttattagagagctccaacaccagatttgagtaggcagaagaaagaatcaataagcttgaagctaggtaaattgaaataatccagtctgaggagcataaagtaaaaaggaataaaaataaacagagcctgagagacctgtgagacaacagagcgagactccatctcaaaaaaaaaaaaaaggtataaacatatgcattatgtgaatcccagaaggaggagaaagaaaggaccagaaagaatatttgaataaaggccaaacatttccaaaatttgatgaaaggtatgagtatatacatccaagaagctcagtgaactccaactaggataaaaccaaaggaatctacaccaagacacattataatcaaactgttgaaagacaaagacaaatcgagaatctggagactagcaagagagaagtaacttgtcacatacaaggggtcctcaacaagattaatgaccaaagtctcatcagaagccacaaggccagaagacagaaggatgatatatttaaagtgctgaaggaaaaaaccctgccaactgagaattctttatctggcacaactatctttccaaaatgattaagaaattaaaacattcaaagattgcaaaaaaaaaaggtgaagtatttcatcactaggaggctttccctatgaaaaacactaaagggagtctttcaggctgagatgaaaggacactaggcagtaaatcaaagccatatgaataaatacagaacactagtaaaggtaaatataaaaactagtataattatatttttggcttatgactcctctttttgtttcctatattatttaaaagatacatacataaaaataattataaatctatgctaatgagcacatgccacataaagatgtagtttgtgataatgacaacaaaagagggggagggataggagtagaatagagtagagggagctgtataggagtagagtttttgtattgctatttaaaccaagttgttatcaattcatactatattgttataaatttcctgtgaagtgtaaacctcaaggtaaccactaagaaaataactaaaaatatacagaaaagaaatgaggaggctatcaaaatggtgcactagaagaaaatcaatcaatacaagagaaggaggtaatgagggaattgaataacaaaagaaaatttgatataaatgaaatgaatagcaaaatgcagtggtaagccttttatcatgaatcactttaaatgtaagtagattaaattcactgattagaagacagaatggattgacagaaggaattaaaaaacatgatccaactacatactgtctacaagagactcactttatatccaaagacacaaataagttaaaagtgaaaggatggaaaaagatattctatgaaaatagaaaccaagagagagctgaggtggctatactaatgtcagataaaatgagtcttaagtaaaaaattgttacaagagacaaacaaggacattacatgttgataaatgtgttaatttgtcaagaagattggccaggtggtggctcatgcctgtcatcccagcactttgggaggccaagatgagtggatcacctgaggtcaggagtttgagaccagcctggccaacatggcgaaaccctgtctctactaaaaatacaaaaattagcagggcatggtggtgcacacctgtagtcccagctactcgagaggctgaggcaagagaattgcttgaacttgggaggcggaggttgcagtgagctgagattgcaccattgcactccagcctgtgtgacagagcaacactctgtctcaaaaaaaagaagacataataattatgaccatacatgtgctaaacatcagagcccaaaaatatatgaagcaaatattgacagaactgaatagaggaatagacagttctacaataatagttggagaccatctagacagaagactaagaaagtaggggacttgtacaactataaaccaaccagagctaatagacacacatagaacactccacccaacaataacagtgaccacaaagtgcacatggaacattctccaggactgactatatgttaagccacaaaacaagtcttgataaattttaaaagattgaaatcatatgaagtgtcttctctgatcacaatgaagttaggtatctatagcagaaggaaaactggaaaatttacaattatgtggaaattaaatagcatatttttaaacagtcatcatgtcaatgaagaaatcacaaggaaattagaaaatacttagagacaaatgaaaatgaaagcaccaaaaacacacccagaattatgggatgtagcaaaagcagtgctaacagggaaatgtgtagccctacatgccttcattaaaaaaaaacaacaaataagatcacaaatcataacctaactttacttttaaaggaactaaaaaaagaaggacaaatgaaacccaaaggtagcagaaggaaggaaataataaagattagagtgcaaacaagcaaaataaagaatacaaaatcaatagagatgaaagaaaccaagagtcgtttcttcaaaaagattgacaaaattgacaagcctttagttggactaagcaaaagaaacaatacaaatcactaaaatcagaaatggaagtgggaatattactacaaatcatacagaaataaaaaggatcataagggagtactgtgaatgactgtatgccaacaaattagataataatagttgtcaacttaaatattaaagtttggtaacacaaactgccaaaactgactcaagaagaaatagaaaatcttaataaacatacaacaagtaaagagttgaatcaaaaacctcccaatgaagaaaagtccagagtcagatggctacactggtgaattccactaaacattggaagaagaattaacatcagttcttctcaaactcctccacaaaacaggagagaaatccagacaagagaaccacaagaaaacaaaactacagactaatattccttatgaatatagatataaaatttcacaaaaatacaagcaaactaattctacagcacattaaaaggattatacagtgtgaccaaaaaggatttatcccaggaatgcaagggtggttcaacataagaaaattaatcaatacaatacataacattaatagaataagaaaacccacacgatcatccaaattgatgcagaaaagcatttgacaaaatttaacaccctttcatgataaaaacactcagtaaagtaggaataagagagaactccctcaacatgataaagaccatatatgaaaaacctggctgggcacagtggctcatgcctgtaataccagcactttgggaggccgagacaggcagatcacctgagatcaggagttcgagaccagcctggccaacatggtgaaatgctgtctctactaaaaatacaaaaattagttggatgtggtggcacacacctgtaatcccagctacttgggaggctgaggcaggagaatcacttgaacccatgaggttgcaatgagctaagatcatgccactgcactccaacctgcaccagagtgagactccatctcaaataaaaaagagagagacagagaaagaaggaaagagagaaagaaagaaagagaaataaagaaagaaaaacccgcagctaacaagctaacatcacactaaatcagtgaaagactgaaaacttttccaccaagatcaggaaagaggatgcccactttcaccactggtattcaacattgcactgaaagttttaaccagaacaattcagcaagaaaaagaaataaaaggcattcaaatgggaaaaggaaagagtaaaaactactgttattcgcagatgacatgatcatatatatggaaaattctaaagaacgcacaaagaaattattagagctaataaattcagccaagtgacagggtataagatcaacatacaaaaataaattgtgtttgtatatactagcaataaacaaccccaaaaggaaattaaataaattctatttataatagcatcaaaaataataaaatacttaagaataaatttaaccaaggaggtgcaagatttgtacactgaacactataaaatattgctgaaaaaattagaaaagacctaaataaagttttttaaattctatgttaatgtaatggaagatttaacattgcactcctcaaagtaatttatagatttaatgcaattcctataaaagtcccaatggccttttttaaaaaatggaaaaactgatcctaaaaatcatgtgaaatttcaagggacccagaaaagccaaaacaataaagttggaggactcaaattcccatttttaaaatttactgcagagccaagattgtgccattgcattccagcctgggcaacaagagcgaaactctgtctcaaaacaacacaaaaacaaaaacaaaacaaaacaaaacttactgcagagctacagtaatcaaaacagtgtgataatcctggcacaaggctagacatatagatcaatggaattgaacttagagttcagaaataaacccatgaatctatagtcaattttttttcattttttttgcattaaagcacactatcaacaaagtgaaaagacagccacagaatgggaaaaatatttgtaattcatatatctgataaaggtgagtttccagaatatacaaagaactcttaaaattcaacaacaaatgatgaacaatcaaatttaaaaattggcaaggagctgggcacggtggcttatgcctgtaatcccagcactttgggagactgaggtgggcggatcacctgaggttaagggttcgagaccagcctggtcaacatggtgaaaacccgtctctactaaaaacacaaaaattagctggatatggtggcacacgtttgtaagcccagctactcgggaggccgaggcacaagaatcgcttgaacccaggaggtagaggtttcagtgagccaagatcacaccactgcactccagtgtgggagacagatcaagactctgtctaaaaaaaaaataaaataaataaaatttggcaagggacttcaatagacattactccaaacaagatatgcaaatgactaccaagcacatgaaaagatgcttaccatcattagccattagggaaatgcaaatcaaaaccacaatgagataccacttcacatccgctaggatggctataataaaaaccaacagaaaatacatattgtctgctgggtgcggtggctcacgcctgtaatcccagcactttgggaggccgaggcgggcgcatcacgaggtcaggagatcgagaccatcctggctaacacggtgaaaccccgtctctactaaagaaaatacaaaaaattagccaggcgtggtggcaggcacctgtagtcccagctactcgggaagctgaggcaggagaatggcgtgaacccgggaggcggagcttgcagtgagccgagatcgcgccactgcactccagcctgggcgacagaccgagactccatctcaaaaaaaaaaaaaaaaagaaaaaaaaaaaaaagaaaatacatattgtcaaggacgtagagaaatgggaaccttcagacattgctggtgggaatataatacagggcagctgctgtgaaaaacagtttgtcagtttcttaataagttaaacttatttaaaagttaataagttaaactacctttaactcaacaagtctccttctgggtatatatccaaaagatttgaaaatgcatgtctacacaaagactcgcatgcaagtgttcatagcatgcttgtttgtagtaaaggaaaaagtggacatactccaaatgtccatcatctcatgaaaggataaatgaatgtggcatatctatgcaatgtaatattcttcagcaataaaaatcaatttttattttttatttttttgagatggagtttcgctctgtctcccaggctggagggcagtggcactagctctgctcactgcaacctccacttcccgtgttcaagcaattctcctgcctcagcctcctgagtagctagggctacaggtgcacgtcaccatacctaactaatttttgtatttttagtagaacagggtttcaccatgttggccaggctggtctcaatctcccggcgtgtgcaaccacaccaggctaattattgtattttttagtagaggcggggttttaccatgttgtccaagctggtctcgaactcctgatctcaagtgatccgcccaccttggcctcccaaagtgttgagattacaggcatgagccaccgcgcctggcctaaaaatggatttttagatatgtggtgccaacacacgctacaacgtggttgaaccccaaacacacgatgctgaaagaaactaaacacaaaagacaacatattgatatgagatgcctaggaaaaaaaaaaagcaaaatcagtagaggcataaagtagacgagtggccctgggaatgggaatggagattgactataagcaggcacaaggaacctttcaggagtgatgggattgttttaaaattggatcgtggttataattgcacaattcgataaattcactaaaaatcattgaactgtacatttacagtggcttgattttatgttatgtaaaacatagctaaataaagctcttaaaataaaaataaaaaagaggaaatgggttgagggagggggtgtgtcaattattttttcccaggaggccccttggctgaaatgcaaatgtgaccacttcctccccgctgaccagctatcagcactgaggcatggttggagggccgctgagatcctatggtaccttccttccaagggtatagaggccatacttatgagacatttacagacccagaggaacccctcaagggaccacatgtctatttctgaggggactcatgtttaccccagtggacatgggcctggcagctccaaatgcatctactttttaagcaccaagggactgtgacccctgctgatcccacccattccccaactcctggcctgaactgaaaatgtaaactggattaagccactcttaagatgaaaccctccaatgatgacttcccatttcctttggaacaatctaccttcctcacccgaaaccgtgaggtcccatgtggtgtagatgtgtgatttccgtgccttcaccttctactattcctccatttgctcactgtattacgccatgctgttctcaagttcctggagccagccacattctttcctacctcagtgcctttgcacttgcagatccttctgccgataatgttcttcccatggctgggcacttcttagcacctagtgtacccccaaatgtcacaaccttgatctctcattggttttctatgacatttagtacagtttacattgagtttgtctgttacttctttttgtctaactctccctactagaatataggctccatgggggctgtcactgtgtgtatatttctgtgggctagccccaggatgtagccaagctgcgtgattttggacaagtcacttaacctctctgagcctgctcaataaatattagggggaggaagcaaggaatggctgggtgggtgggtgcagagaagaatgaatgggtggataggtaggtgggtgggtagaaagcaggtagataaagaaggcaggcaggagggagggaggagaaattgaatatccttgttttcatacacaccccagagcagtgtagtgagttaagagtgcgggctctggagcccaaatgactgagttcaaatcccaactctggcactcatcagctgtgtgaccttggacaagtcacttaacctctctgagcctcagtttcctcatctgtaaaacagggacgatgatgatgatgatgataactatcttctagactcattctttttcattttggggattttatttttgaagacagagtcttgctctgttgcccaggcttgagtgcagcactacagtcatagctcactgcagccttcagctccttggctcaagtggtcctcccacctcagcctccagagtagctgggactacaggcgtgcaccaccatgactgtctaatttttaaatttttttatagagacagggtcttgctatgttgcccagactggtcttgaactcctagcctcaatcgatcctcccacctcagcctcccaaaatgatggaattataggtgtgcaccgctgcacacagccttctcgagtatttctgaggtttaaatgagagggtgcatctttaaagtccttaaaaccctggcacacaatgagctttcagcaaatattagctctttttactgtctcttctcctgatctttcaaccactacaaatttcagtgcatgttatcagagaattcaccccgaagatcaagagaaagaaaaacaaaagctggtgtcttcccaaggttcgttctccagagaacacgacacacttcggtagctgggaagagctctacagggccaggatccctcaaatcaaccacaggggaatttgtaccaagttcctcaaaaacagctagaaaaaaaaagaaagaaagaatagcaagacgctttctcttttttctctggagtggtcacgaaagtcaacagcaagttgattcccaaaaatgagtcagcagggagagctacaaattgcatcttgttatcaaaacagcataaaatagcctcccccaactgtgggacatttcatcctggtatggccctgttttcacagcctggtataagcttaggaatcaaacacacccaggttcaaatcccagctctaattcttcttggcttgtgtgacgtttcactcctctgggcctcagtctctccatctgtaaaatgggactaatcttgtctgcctcacactttgtgggataaagtgagatcatgtaggcaccaaagtaattcgaggtggtggtgatggcagtggtagtggtggtggtggtagcggtggtggtggtagcaattctcttgctctcctttggagactgcactaggcattaagcttgttacattttgtctcctggtttcttgaatgtcttccagaaacatctgaccctctcatgggcctctggcatgttagcaagatgaaaactctcttgagaatttcttttctctattttcttcttgaattctcatgtgttaatgtctgccctcttcctcatagctaggtgcccccatttgacagatgggcaaagtgaggcattcagagaggtgatgtgacgtgcccaaggggtcctgctccctggagctctgcagcaggagactggatccaaaggaaatggaggcagagaggcatgggggtcaagccagagcagagggtcccaagctcagaccctattaggcaggtaaggctcaggaataagaaacaggctggtttgcaaagtctgaaaaaggggcttccgtgggaccttgggcaaggttctggtccttctctctgtgctgaggggctggagtcggccactgaggactctgggtccacgggtgaaactgtgccacatcttcacacctctggcctcagtttccatatctgtgcaatgtggtggctccaggaggcactgcctgcctcatgggttatgactgagaggcctgtggggatgatgtcacaggtccctaagagggaagtgtcaccccgatggccccaaatgtcttacttgcaggtgacctttggtgacagtgggtgcctgctgtggggccaggccccctcccacctctttctcactccctcccaggaggagcccagctgcgggtgggcggggctggcggggagcggctcaccacatcctcctcttcctccccactctgcacatgcggctgggtggcagccagcggcctcagacagacccactggcgtctctctgctgagtgaccgtaagctcggcgtctggccctctgcctgcctctccctgagtgtggctgacagccacgcagctgtgtctgtctgtctgcggcccgtgcatccctgctgcggccgcctggtaccttccttgccgtctctttcctctgtctgctgctctgtgggacacctgcctggaggcccagctgcccgtcatcagagtgacaggtcttatgacagcctgattggtgactcgggctgggtgtggattctcaccccaggcctctgcctgctttctcagaccctcatctgtcacccccacgctgaacccagctgccacccccagaagcccatcagactgcccccagcacacggaatggatttctgagaaagaagccgaaacagaaggtaattccagccctggttttctgctgggaccagggtgccttctctgcccaggagggactgttccctgcctgctgcatctagtgtcacagtgggagggctcggaggactgtgcccaagtcacaattggggacactgaggcaaagaagattcatgcagtgaggctgggcagaaatgaggttggggtctcttgttcagcacagcttaggggcccagcagcagggatgtggctgagacgaccctctatcttgaaaaccagcctccaaaatgtagcgggctggggaaggaaagccagtttcaagccaaacataacatgtcaatcacccgattctgggcggctgagtcgggaggtgacgggcatgggtgtagagcctgatgggacccattctgtgtcagtttctatgtcttaccaccttgattccacccagtcattcaaaacaagggctggtgtgcccatttcgcagatgaggcaatgaggctgcgagaggtagagtgattttccctcggtgactcaactgggacgtagcaggtcgggcagtcaagccaggtgaccccatgagctgtcgctgcatctttctcatgaagcacggggaacgggtcggatggtaagaggccaacccagttccctgtgcatgtggaggagaggagggtggggaggtcagtggaggctgagccttgaaggatgggaaaggaagaacattcctggtggaggagccctggggagcgggaacttaggacttgccgcaggaatgacgtctctgctcagtgaaggcagaagaccaggtgcgggacattcaaagccaggaggctgctgcgaggaggacatctgtgattccctggggggagagtggggctttcagaagcacatggtggagtcggggaaaacctgccaggtcaaaacccggccacgcgccttcctcactcggtgaacttgggcaagtctctctgcttctagccttgagaagccatggttttctcatctatgaaatggggaccaaggtacccccatcctggtggagctagttgtggggacctcagggccgaacagggtgaaagctgtgctcctaatggcccttttcctttgaggaagagagtttgtggcatgagaagctttgagcccatggagacgggcccgactccaagagtgacagagggggagcgacacactcaggctgctgtggtcctgcctggccagccacctggctctggcccccccagtgccaactcaccatgttgtaggcacttaagcgtctcccatagtcctcaacaggtgaagcgggcagcctcattcagcccatttcacagatgacaagagtgaggcttagtggggacaaccttgccccaggttaactgtgaccagatgacatggagctgggattggatgccagtctgtaggacaaggccaccacctgctagatagaataacatgaaaacaagactcatgggcttgggtagcttctgggaagcagcattggatggggatggcggagtattcattcccacgaggacaggcaacccccagaggagaggccctgctcacctgctccccaccgtgggctcagcgatgcccctgtcctgcccgctcctctgccaggagggtgtccggatccttactcagtcccacagtggaggtagctaaaagcccttgtgataggaggaggcagaatccaggaccaggagaggtggggagagcaaggcaaagacagctctgagctcagactgcaggctcccactgcccagcgttcctggtttcaggctaggagaagaaactgggaggtggggattagagccagtaaggggcttgtgggcagtagagtagggggtggataccagaggaggaggcccattcaagagaaagccagccaccagaagttctgggaggaacccacctctttgtagcatcaggacaacccaggtgcctgataaataaatgaatgaaaggaacggggtatccgttccttccacagccagagagggaagctagcgccttcagcatcctcacaggcaggcacaggggccttctccacacaactaggaaggggtgcctgcggttagatgggggaactggaactggcttcccagcacaccaccccttgtgactttgagctgtggaactggccagacctgggttcaagtccaccgcttagtacctgtgtgaccttgaggaagccacctaacctttctgcagctcagttgctgcatctgtaagagtggaaataggaataagaatgcctgtcttaggtctgtggtgaggatttactcaacctattctttatggaacatctaccatggcccaggcacctccctaggtcctgaagctctggggtacacagagagagccagtgtgatggggaaggcaaaagagctgggcacagatggctcatgagaagtgcccgctatcatgttttacttttttttttttttaatttttttttgagacagagtcttgctctgttgcccaggctggagtgcggtggcgcaatctcaactcactgcaaccttcatctcccaggttcaagcgattctcctgcctcagcctcccgagtagctgggactacaggcacctgccaccacacctggctaatttttgtatttttagtggaggcggggtttcaccatgttggccaggctggtcttgaactcctgggctcaagtgatctgcctgtctcagtctcccaaagtgctgggattatagacatgagccaccgtggccggcctatgttttactttaaatatgtaagagctctttgcttttagctatgaaaatacagaaaaaaaataataaatattattggtcatattggcatatatgagacctcagtaaataagagctcttatgatgattctgcttccccccttttacagatggggaaactgaagttcagagcagggtgggggtttttctagggtcactcagggaaccgtctagaagggagcagtgaaaagaggggaacagatgcttcctccaggaagagggtcttcttgccctcgcagccccttcctcacatgccctccttccctgccctccggagcccccggacacgtgaaggggagggagagggggcaatgggaggaacccacccccacccctggctcacaggtgccaccgcccccactccctgccctggccccaggccaaagggacttttcatgacagctcaaatgagacctctgagtaaacttggaacttctgaaacgacctgagaatattccccaggctggggggcaggggccacaaggagggcccccgactgcccaggacatctgcatcaggaacccagcctgctgatctctgcagcccacaggaaggatctggccaccccgacccctgccctgaattgtccccggggagttggggcaagtgcaccagcccgggtcctagcccaggcccctgccatcccccactgtgtgaacaggacaaggccctgggcctctctgggcctcctttccccatctgccaagcgggcttgactaggacgagggcttgccaactttccccagaatgaatcagtaacaccagtccactttggccagggccagggcgggctgatgggggctgctgggaactgaggggagagagacggtgggtggccagctccgctccatctcgtggcatagttcaaagcctcctttcactgctctacaagcggcccctcctgggctggaggaaatggagctggagtgagatctggctgcagaggctgagaggttgcaaggtttgggcaaggctgcagaggatggcagggcttgcagggagatagagattgcacaggcagcgggggtggggagtggggggtgcgggtgctgggactgggacctcatgctccacagctaggagaggttgcacaggctggaagaagtgccaggagggaaagattgctggagctaatagagatttgctgcctggctaggagagagagataggctgagaggtcgcacagcctcagaggttgcacgagctggggaggagaaggcccttcctctcaccttcgtcttctactgattaactgtaagcctgaggtccccaacatacctgccttcagacacccataacccaccccttgccactggcgaaaaaaaaaaagatgaaaagcaactaacactaaccacacacctaatactaaccacactaacctgcctcacactccgcatccaggctaagcctgctgcccccattccacagatgaggaaagctgaggctcaaagaaaggcagagatacggccaagttcccactgtgagtgaatggcagagtctgctttctgacccagggccactgggctagttcttccccagcctgagaacccactgagatgagaacttgctgtgtgaccctgggcagcccactgtccttctctgaaagttccttgttactaatctgatgacattagtcatgattattcacactctggaagcagaagatgttgcctgaggtgggtctggggggagtttctggggacagtgaggaagctaatgaggaaagcaggacctcttaggggctgtctccatttttagcctcattcattcattcacttaacattcttcttcagctacttatggggcacctacaggtccccttctctgcactagggatactgtgctgaacaaaataggtcaattacccagcctctgagagctcatgcttcagtacagaaacaagttacaaacacatacacagagacatttacaaaacgattcctcatcttacacctgctatgaaggagacaaactaggggatgtgggctacagagatctgtggcgtagacccagttcagatagggttgcctctttgaagaggcaacactgaacttgaaacctgaggatgagaaaggaaagaagctgggggaaaagcattctaggcagagggaaaggcatgtccaaaggccctgatgcaggaaaaaaagattgaagcattaaagcttttatcctcggccaggtgcggtggctcatgcctgtaatcccagtattttgggaggccaaggagggtggatcacctgaggtcaggagtttgagatcagcctgaccaacatggtgaaaccctgtctctactaaaaatacaaagttagccaagcttggtagcccatgcctgtaatcccagctacttgggaggctgaggcaggagactcacttgaacccgggaggcggaggttgcagtgagccaagatcgtgccactgcactccagcatgggcaacagagcaagactccatctcaaaaacaaaacaaaacaaacaacaacaaaaaacgtatcctcaccaaatacataaggctctcaatcccctaaagctccagaaaaatgggtcaaaaagggtaagatttaactttggagtgtacggtctacataggtcttaacattgaggataatgtttgttcacaattcgtttccatagaaagcattctctttcatttagtcactcatgtagcaaatgttttgagcacccactgtaggcactggttagttactggggattcagcagtaacaaagaaacacactgtccctgcctagatggtgcccagaatatagatgaaaacaccatgagctatgtactatgtggagggtggaccccagaggaaggagtgactcatgctctttggagaggtcaaagattgacagaggagctgccatttgaatgggattttgaagactgagtaggaggctaacagtcagtcaaaaagggcagatagtttccgtggctaaaacagcacatgcacaggtgtgcaagccaggtgaatggagcatgttggtgaggctgtcagtggtctgatgagcctgaagtccagtatgaatactgggggctagatcccgaaatgccttgaataccagacaaggaatttggggtttttcttttgtggataacagagagccatggaatgacacggttggagtaagaatggagttggaggaaccacagctctgtagctatagcaggaaggtcagagaggaggaccagcaggagagcaggtgggcagaagtccttgaagaccctggataactttaggagttctttcttctgtgttccctctcgggaagtccctccgccttaacacttcctcttctggtgacctgttggctcctgttcctggcacttctggggagtccctcttcgcccacctcatttctttgtgatccctataggaaatagggccattttacttttaccacactacccacctttcactttcagccccatgtccctacctgggtcacattgcagagaatggccgacttgaggaactagacgcatcccattcctcaatcgtgtgacagaaaaaagatacagggaaaccaagaacttgggttctttccagtgtggggaggttgtaaataatggctgctatgaacatgctggtacatgtctgcttgggcacatatgcttgcatttctctttggttatataacttggaagtggaaatgttgagtctctgctcagcagaagttttccaaagtggttgtgtcgatttacactcttaccagaatattgagtagagacagagagtttagttactctgtatccttttcagcacttggaattgtgtttatttctctctctctccatatatatatttataaaaataaattatatatgtttattatatataatttatattttataaatatatataatatttataaataaatatttttatatttatattttattataaatttacatatatatataattctttccctcttcctctttcagtttcttttccattctcttaatggaaacttttgatcaataaaaaatcttaattttcatgaagtttatttataaatctttctttatgaccagaactttctatgtgctgtttaagaagtgttgcctgcaataaagtgataaaaatattattctgtgttttcttctagacgatttactgttttacctttcacatttaggtctacagtctatctgtagtttatttttctgtatggtgtaaggtaggggtcaaggtttactttttccatatgaatattcaattaatataccatcatttaagaaaacatcatgttttctctccactgccttgcactggtgacttactgaaaatcaagtggttgaatacatgagtttatttctactgtttctgttcttttccattggttagtttgtttttccttgcaacaatgccatactttctaaattactttataaatcttgacattcttcttcaaaattgtctaaactattttcagtcctttgtatttctatataaattttagaactatcttgtcaatttccaccaaagaaaatcttgctggagatttttttcttgaaactttggattttactgaaactttacttcaatttgggggggactagcatccttaaagtattaaattttccaatccatgaacatagtatgtaccaccacttatttatgttttctctaatttttcttagtaatgtcttgtaggtttctgtgtagaagtcttgtacatcaactaggtgcagtggctgacacctgtaatcccagcactttgggaggccaaggtgggtggatcttttgaggtcaggagttcgagaccagcctggccaatgtggtgaaaccctgtctccactaaaaatacaaaaattagctgagtgtggtggtgcatgcttgtaatcccagctactcaggaggctgaggcagaattgcttgaacccaggaggcggaggttgcagtgagcagagactgtgcctctagtgacagagctgagtgacagagcaagactccatctcaaaaaaaaaaaaaaagtcttgtacatctttcattagatttcttctcggatatttgattttttgatgctgatgtaaatggcataattttaaaatttcttgactgtttgtagtgtacagaaatataatgagtttttatactttacaactttattaacactttttaaagctaaagttccagatgttaaaagaaatagctatcaaacccagcccacttcaactgaccaccagttgagggcttcctgcctttctttgcttttgtaatgtttatggatcctttcctttgctaatctaacaagagagggtattgtagtgcaaagtatagtgtcccgggtttggattttattaaccagtagatcttttttacccttaacaatttttagatgtgcagtacaatattgtaaactgtatgcacattggtttacaagagatctctagaactttttcctattgcatgggtgaaactctatacccattgaaaaacaacttttcatttctccctcccccagtccctggcaatcagcattccactttctgtttctatgagattgattactttacatacatcatataagtgatacaatgcagtatttgtttttttgcaattggtttatttcactttgcagaatgtcctcaagaagcatccatgtcgtaacatatgacaggacttcctcctttttaaagtctgaataatattccattatgtatgtactacattttctttatccattcacctatcaataaatttaggttacttgctcatcttagctattgtaaataatgctgcagaaacaggtgtgcaaatatctctttgagatgctgtttttatttcttttggatatatgtctggtatttctatttttttaattaaaaaaattttttaaagtttcgcatcattttacaatcccactaaaagtgcacaagggtttcaattctctacatcttcaccaccatttgttcttttctttttttttataataaccatcctaacaagtgcaagatgatatctcattgtagttttaatttgtatttccctgatgattagtgatattgagcatcttttcgtatgcttaatgggcatttgctgatcttctttggggaaatgtctattcatgtcctttgtccttttttttttttttttttttttttttgagacagagtcttgctctgttgcccaggctggagtgcagtggtgtgatcttggctcactgcaacctccgcctcccaggttcaagcaattctcctgcctcagcctcctgagtaactggaattacaggtgcctgccaccatgcctggctaatttttgtatttgttagtagagatgggatttcgccatcttggccaggctggtcttgaactcctgacctcaggtgattcgcccgcctcggcctcccaaaatgctgggattacaggtgtgagccaccacacccggccatttttaaattgagttatttgtttttgtgttgttattgagttgtaggagttctttgtatattctagatattaaccccatatctcttgtatggtttgcaaatattttgtcccattccataggttgccttttgattccgttgattatttcctctgctgaacagaagttttaaagtttgatgtagtctcatatgtctatttttacttttgttgcctgtgcttttgttatcacacacaagaaatcattgcccattccaatttcacgaagattttcccatatgttttcttctaggagttttatagtttcaggtcttatgtttgggtctttaacccattttgagttaatgtttgcatatggagtaaaataaggatccaacatcattcttttgcatatggatatttggttcttccagcactatctccttgaacaaacttccttttccctcttgtatagacttagtgcctttgtagatcatttgactatatacacaagggtttatttctgggctctctattcttttccattggtctgtatatctatctgtatgccagtaccatactatattgattactgtagctttttaatacattttgaaatcaggaaatgtgaggcctccagctttcttctccttctccttctccttctccttcttcttcttctttttttttttagagtgttcttctttctcaagattattttggctatttagggtcccttgaagttccatatgaattttaggatgaattctttttttatttctgcaaaaactgtcattgagattttgatagggtttatattaaattcagttttctgtgagtagtattgtcatcttaacaatattaagtcttccaatccatgatcatgggatgtcttttcacttatctgtgttctttaatttccttcaaaaatgttttatacaagtctttctcctccttggctaagtttattcctaagtacttttctctttttgatgctattgtaaatgaaattttttgcttaagtttctttttggattgtccattgttaatgtaaaaaatgcaactgagttttgagtgttgactttgtatcctgcaactttgcttaattcatgtattagttctaaccatttttttaatatttagggtttcctacatataaaatcacgtaatctgtgaacagagataattgcatttcttcctttccaatttagataccttttatttctttttcttacctaattgctctggctagaacttccagttgaatagaaatggcaagtgtgggcatccatgccttgttcctgatcttagaggaaaaggtttcagttttttactgttgaatatattcactgtgggctttttatatataaactttgttatgttgaggtaatttatttctatttctagttccttgaatgttttctttatcatgaaagagtattgaattttttcaaatactttttctgcatcaggtgagatgaccatgtgatttttgtccttctttgtgttaatttcatgtattacatttatctgatttttgtaactatccttgaattctgcagataaatcctacttggtcatggtgtatagccttttaatgtgttgttaaatttggtttgctagcattttgttgaggatttttgcatcagtattcatcaagagtactggtctatggttttgttttcttgcatctttgtctggctttggtactggggcatcataaaatgagtttggaagtgttccctactgttcaatttttggaagtgttagggatgaattggtgttgattctttaagtatttggtagcattctctagtgaagccatttggtcttggccttttttttttttttctaggaggttttcgattactgattcaatctcctttctagtttaggtctgcttagattttctattttgtcatgatcagtatgggtaggttgtatatgtctaggaatttactaatttatttgaagtatccaattcgttggcatataattgttcatagtagtctcttagaatcctttttatctctgtgacatagttacaatgtctcctctttcatttctgattttagttaatttgagtcttctctctttttttcttagtttaactaagggtttgtcaattttgctgattgttagaaacacaatagatttttatattgatctcatcttcagcttctttgaataataataacaattattattctaatagtttatttgttgagtatcgtggacttttctggttcctcaattcttatataacttaaacacatagttttctaatctttataaattaaaagtttcttatcattgccttattatgttaattagcacctctagtataagatgtttttgtttttgccctgacctcagtaaggaagtgttcaatatttcacaattaaggataatgttagctatgtatagtgtgtgtgtgtgtgtgtgtgtgtgatcgtaattagattaaagaagactcctctatttctgctttcctgacaggttttaaaaatcatgaatgggtgttgcaatttattaaatgtgctttctgaacttattaaatgataatataaattttcttgtttattgagttaatgtggtgaaattgattatggtttctaaatgtcatactaaccttacattcctgaaataaaccaatgtgataataatatgttatccatttttataaatattattagatttgacttgttaatattttgtttcagatattttttagattatttatgggaaagattgacctgtaattctactttcctttaatgtcaagttttggtattaagactgccttttatttcagacatcaatgaaagcactgatgtgtctgggattatgtctaccatcttgctatttgttttcttttttgacctatctattcttccttctttgttctagtttttagaaaatcaagttttaaaaattattattccatttttcctattagtttgttcattgtactttcttttatattctttttgtgcttatcttagagattacaacatgcatacttattattattaggatctacctaatatgaattcttccaaaagttcatggaaaattcaaattatgaaaaaactatgcataaagttcaaacttttttctgcaccaaaataaacttgtactaacttgctataacatgtctgaacaggatctagtttgaggcactaagaaggataaggcgtctgtttgcaaaaaagcccctatcattgcaacatgaattctgctaaaattgaagcaggaacaaacatcaaatttatggtgcaactagggtggaaggatggcgaaatcaatgataaagataaagccctccgtggccgatcatccatatcaatttgttaggaaaaaattcatcttgttcatgccctaattgaagaggaccaactattaacagcccaaacaatagccaacaccatagacatctcaattagttcaggttacacaattctgaccaaaaaattaaagttgggcaaacttcccacttactgggtgccaaaccactgtgcccagatcagctgcagacaacagcagaaacttccatgcaaattttaaactaataggatcaagattcagaagcatttcctcacataattgtaacaggagattaaacgtggctttaccagttcatcctgaagacaaagcagtggctccaaagaggtagacgaggttcagtcaagacaaaagcagaccggtcaagaaaagcaaaggtcatggcaaccggtttttgggatgctcaaggcattttgcttgttgactttctggacagccaaagaatgataacatctgcttatcatgagagtgttttggggaaattagccaaagctttagcagaaaaacgcgcaggaaagcttcaccagagagtcctccaccatagcaatgctcctgctcattcttctcatcaaataagggcaattttacagcttccatgagaaattaggcatccaccttaaagtcctgtttggctccttctgacttctttttgtctcctaatcttaagcaatctttaacgatcacccatttttctttagttaataatgtaaaaaagcctgcattgacatggctatattcccaggaccccccagttctttggagatggactatgtgcctggtatcatcacttacaaaagtgccttgaccttgactgaatttatgttgagaaatagagtttattttttaattgttatctttaattccatgtttccatgagctttttgaagtcctcttgtacaatttgaagtcctcttgtacaaagtcctctttaactttattcacctcttcttacctttggggtttcatggtcgtgtattttaattctgcatatagtttacatcattagtatgttaagaaattaaaaatcatagtaattcacttatttatttatttattttgatacagagtctcactttctcacccaggctggagtctcactttctcacccaggctggagttgcagctcactgcaagctccaccttccggattcaagcgattctcctgcctctgcctccctagtagcctacactacaggtttgcgccaccacacctggctaattttttgtgtttttagtagagactgggtcttgccatgttgtccaggctgatctcgaactcctgacctcaggtcatccacccacctaggcctcccagagtgctgggattacaggcgtgaaccaccgcacccagcctaattcatatatttagagtactttctgttgctcttcatttcaccctacagtaacttgcttcccatctggaattatttttcttttacctgaaaaactcactgttgtatatctcttgatgcaggtctatcagtgacaaaatctcttacttatttttgtctgaaaaaaaatccttattttgccttcattttcaaaaatctgtatttcagatgtaattcacaaaactgaaaatgtactcttaagatgtgcaattcaacaaagttgtgcagtcatcaccactaactctatattttcatcactccaaaaacaaacctacatccattgctgttactctctatcccccctcccctcagcctcagctcctggcaaccactaacctactttctgtctctatggatctgccaatgctggacatttcatacatatggagtcatacaatatgaggccttttgtgtctggtgtctttactttagcatgaatttttaaagttcatccattttgtagcacgtatcagtagttcattcccttatatggctaaataacattctactgcatggatatactacatttctttatccattcaccagtcgatagaaattttgcttgtttccagttttttggtattatgaataatgttgctgtgaatatttgtctacaatggtttgtacatttctttctggacatatatccgcaattgttttctttcctttttctttcttttttcttttcttttttttttttttttgagacagggtcacactctgtcacccaggctggactgcaatggtgtgaaaacagctcactgtagcctcaaactcttgggctcatgtgatcctcccaccttagcctcctgagtagctggggccacaggtacataccaccatgcccagaaaatgttttcattttaatttttgtagagatgaggtcttgccatgttacccaggctagtctcaaactcctgggctcaagcaaccctcccgccttggcctcccagtatgctgggattacaggcatgagctactgcatctggtcaattcttttcactatataactaggtgtgaaatttcttggtcatatggaaacagtcatacattgcttaatgacgaggatacattctgagaaatgtgtcattaggtaattttgtcattgtgtgaacgtcatagagtgcacttacacaaacctaggtggtatagcctactacacacctaggctgtatcttacagcctataattggctacaaacctgcacagcatgatacggtactgaatactgtaggcaactgtaacacaattgtaagtatttgtgtatctaaacatagaaaaggtacagtgaaaacataatataaaatatgaaaaaacggcacacctgtgtagggcacttaccatgaatgcagtttgcaggattcgaagttgctctgggtgtcagtgattaagtgctgagggaatgtgaaggcccaggacattgctgtacactcctgtaaactttatcaacactgaactcttaggctactctaaatttatttgaatttttaaaataataaattaactttggcttactgtaacatttttcctattttatttattttattttattttattttattttattttattttattttattttattttatttatgttattttattttatttaagacggaggttcgctctatcgcccaggctggagtgcagtggcgtgatctcggctcactgcaagctccgcctcccgggttcacgccattctcctgcctcagcctcccaagtagctgggactacaggcgcctgccactgcgcccggctaattttttgtatttttagtagagatggggtttcacgtgctaaccaggatggtctcgatctcctgaccttgtgatctgcccgtctcgcccttccaaagcgctgggattacaggcgtaagctaccgcgcccggccctattttatttcattttttgagacagagtctcactctatcacccaggctggagtgcagtgtcgcgatctcagctcactgcaacctccgcctcccaggttcaggcaattctcctgtctcagcctccagagtagctgggactacaggtgcgcgccaccacgctcggctaatttttttggtatttttagtagagacggggtttcaccatgttagccaggatagtcttgatcacctgacctcgtgatctgcccgccttggcctcccaaagtgctgggattacaggcatgagccgctgcgccccgccaacattttttctttataaacattttaactttttaaaactttttgaataacacttttgtaataacagttatcttattgtaataacacttaagtgttttcgtgcactcttgtactaacacttaagacacaaacacattgtacagctatacaaaatatttttctttatattcttattctaaaagcctttttatatattatattttaaaattttttattttttatttttttacttaaaaaaatttttttttgttaaaacctaagacacgcggggcatggtggctcatgcccgtaatcccggcactttgggaggccaaggagggcggatcgcctgcaatcaggaattcgagaccagcctggccaacatggtgaaagccccatctctactaaaaatacaaaattggccaagcatggtggcgggcgcctgtaatcccagctacttgggaggctgagacaggagaatcacttgaacccgggaaaaccaacaccacgccattgcactccagcctaggcaacaagagcaaaactccatctcaaaaaaacccagaaaacaaaaaacaaaaaatctaagacacaggcagacacattagcctaggcctacacagggtcaagatcaccaatatgactgtcttccacctccacattttgtcccactggaaggtcttcagtggcaaaaacacacatggagctggcatctcctatgataatgatgccttcttccggaatccatcctgaaggacctgcctgaggctgttttacaagttaacattttttgtttgtttttaagagtcttgctctgtcacccaggctggagtgcagtggcacaatcttggctcactgcagcctccacctcctgggttcatgcgattcttgtgcctcagtctcacgaatagctggaattacaagcacacaccaccgtgcctggctaatttttgtatttttagtagagatggggtttcaccatgttggccaggctggtttccaactcctgacctcaagtgatctgcctgcctcagcctcccaaagtgctgggattacaggcgtaagccactgtgcccctccaacatttttttttaagtaagtacaaggagcacaccctaaaatagtgatttaagatatagtatagtaaatacatacaccagtaacatagtttattattattattattattattattatcaagcattatgtacaatacataattgtatatgctatcttttttttttttttttgagacggagtctcactctgttgtccaggctggagtgcagtggcgcaatctcggctcactgctacctctgcctccccattcaagtgattctcctgcctcggcctcctgagtagctgggactacaggcatgtgtcaccacgcctggctaagttttttgtgtttttagttgaaacggggtttcaccatgtttgtcacactggtcttgaagtcctgacctcaaatgatctgcctgccttggcctcccaaagtgctgggattacaggcgtgagccaccgcacctagccctgcatatgctatacttttatatgactggcagtgcagtaaatttgtttccaccagcatcatcacaagcccatgagtaaagtgttgtgtcatgacgtcactagacaataggaattattcaccttcattatagtcctatgggcccgcctatgtacatgcagtctgtcattgaatgaaatatcattatgcagcacgtgactgtatttaacattttgaagaactgcaaaactgttttccacagtggctgcaccattttacattctcaccctccgccccctcattcacacttgtgattgattattattattaccatcctaatgcatgtgaagtggtatctcattatgttcttgatttgcatctctctagagagtaatgtcaatggccaccttttcatgtgtttgttgtttggatatcttctttggagaaatgtctatccaaatcttttgcccattttaaattttaattcttgccttttagatcttgagttgcaagaattctttgcatattctaaataccagacctttaacaaatacgtgatttgcaaatgctttttttcccatgctgtatgttatagttttactttcttgatagtattttttgaagcacaaacattttaaattttgatacagtttaatagatctattttttctttgtttacttatgcttttgtgtcatatttaaaaaactattattgtctcatacaaggtcatgaagatttacacctaggtttattctaagagtttaatagttttactttttacatctagtctttaatctattttgagtaaatttttgtatacggtgtgaagtagaaatctagcttcattatattgcattgtggatatccatttgtgtggtaccatttgttttaaagactattctttcccccattgaattgttttggcaccctcatcaagaatcggttaaacataaatatatgcacttctttctgaactctcagttcaatcccattgatctatatgtacatctatgtgtcagtaccacagtgttgataagtgtagctttgtagtaagctttgaaataaggaagtttgactcctccaactgtgttctttctcaaaacctttttggctattctagtcccttacatttccctataaattttaggactagtttgtcaatttctgcaaaaaaaaaaaaaaaaaaaaaaagagccagctgggattttttatagagattactttgaatctgtagatcaatttgaggcgtcatcttgataacattaagttttccaatctatgaacatggtatatcctccatttatttaggttttctataatttatttcaataacatttgtaggttttattgcacaagtctcacactaataaacaaattcatctcatattaacataactaatgaattttgttaaatttactttaaccattttgttctgttttgtattattgtaaatgaaatcactttcttaatttcatcttcagattatttattgccagtgtgtataaaatatcattatttgtgtctattaatcttatattctacaactaggctaaatttgtttattagctctaattggtttttgttcgttttaggtgtaaattcctttagttttgtatatacaagatcatattatctgcaaagagaaatggtttacttcttcctttccaatctgaaagtcttttatttcttttccttacctaattgccttggctagaacctctagtaaaatgttttataaaagtcacaagagtgaacatacttgtcttgttcatgatcttaggagcaaagctttcatttctttaccattaagtatgatgttaactgtaatatttttatagctgtctgtatcatattgaccttacttttattttttaagagatttttttctggatataaaattctaaattggcttttgaaatttcagcattgaaagaagttgttccattgtctgctgtcttccatcattttgttaaaaagtcccctgccagtcttattgtttcttccttgaaggtgaagtgtcttttttttctgcatactgcatatctttgtcttttattttttaaaatagtttttctatgatatgcctagatgtggttttctttgtatttatcctatttgtggtttgtagagctatttaaatctgtggcttaatgtcttttgttagtttggaaaaaaattttaagatcactgctatttcttcttacttgttttctctctcttctgcttcttaattgcaaatgcatgtatgttagatcatttcacaatgtcttctatgtctcttttgctcttttctgtatttttgaactttttttctctgcatgcttcaatcttggtattttctattgaccaatcttccagtttactaatcctctcttctgatgttactagtatgttgccaaatccatctcttcagtccttataaacttcagttattatatttttcagttccaggatttctactttttaaataggttccaaatttctgatagaatttttgaacacattaatcatagttattttaaatcatatctgataatgccattttccaattcacctaagtaacttttctattgtctattttatcttcattgttgatcatttgatactgcttgttggtttaccttgtaattttaactgaaagttggacattatgtataaaaagtatagaggctttggatgaagctaactttttctagatcaatttaaattttcttctagcagacatatagcatataagcagattacaccttgatgcagtcaagaatgaactatttctaatttttccttattcccaaggaatagtattttctaaatagctgggtactcaccagggcccatcttttttttgccaggccctgaactctaattcttccctcagcttgtaaaactgtgaaaattccttcttagttttcccacctattagcaggtgtttttttgctaagtttcttggcatgctacttattttcaatgactttgcacatgatttgaggggaaattgcatgcagaatttcaatgcatttttcctctcttaagtactatataagttggcactctcttgtgcagtttttttttttctgcttagtagttgccctcagtgggaggattagtgtgacaacagctacttcattatagccagaagtggaagtccctcatccatattttattttacaaaactaagcctcacttacatttaaaatggtatgaaatagtttgaacatacaaaagggcataaaatataatcaacacccatggtagcttcaccaagctttaccaaactgttgagacccttgaacattcctccttctcacaccccctccttttccacactattcaaaatttgatgttattatccccatgaatttttaaatatttttatgatgggtgtgcttacctaaacaatatataggatgattttgtatggttttcagtgtggtgtcaatggtgttattatgcttatgctgttctctaacttccttttttcactccaaattttgtttgtgagagtcattcactttgttgtgtgtggctgtaaatgattcatgtttacactgagtgacagtattgcgatttattttttcactctcctgatgatggctatttagattgtttccaatttttcactattaaaatcaatgctgctatagacatgcaggaagaatttctttaccagtttacataagagtgaagttactgggttttaggtagggcatgtgttcgcttttattaggtcatgccaaactttttaccagaccagttgtaataatttacatttcctctggctataaatgagagttcctattatatcatatcctgagcaatatgtgatgtcatcagactttcagtttttgccaatccgacaaaattaaaatggtatgtcattgtggtttttctttgtatttcttttctcttctttttcttttttttgagatggagtctcgctctgtcacccaggctggagtgcagtggtgcaatctcggctcactgcaacctccacctcccgggttcaagcaattctcctgcctcagcctccagagtagctgggattacaggtgcccaccaccacacctggctaatttttgtatttttagtagagatgggtttcaccatgttggccaggctggtctcgaactcctgacctcaggtgatccacccacctcggcctcccaaagtattgggattacaggcatgagccaccacgttgaccatgaagttaagcaccttatattctccatagcactcacttcaatctaatttcctgccccaagcttctccatttccccagaatctcttgaaatttggtcaacttttagggtgaattacagcaactccaggaaacatttctcagcactgaaactggtggataaatgcacctacaggacttcaaattcgatgacacttttaatgctcatgacaaacctgcagcaaagattgatgacctccattttatggatgagaaaacagagaatcagaggggttagagaacttgcccaaagacgcacagctgggacctggcacactccaagtcaggtgcacttcactcctccgtaggagactgcagaggttgggtgctgcagcggtgtgtcaggccattcttgcattgccataaagcaatacctgagactgggtaatttataaagaaaagaggtttaattggctcatggttctgcaggctgtacaagcatactgccagcatcttctcggcttctggtaaggaggccctcagggagcctttactcaaggctgaaggtgaagcagaagcagacacatcacatagcgacagctggagcaaaagggggaggcgccacgcacttctgaacaattagatctcaggtgaactcactcatcaccaagcggatggcactaagccattcatgagaaatccgcccccatgatccaatcacctcccaccaggccccacctccaacattggggatgacatttcaacatgagatttgggtgggacaaatatccaaaccatatcaaggggctcctgtagcaggaagcctcctaagacaccttctgtccttgtaggaaacacacatggtggcccgatctgtatctgaggataaggtgctgttgccctcaggggtcagcctgcgtgcaaagacccaaaaggggatggattcggggcagagaaggcagtggaattagggtaggccccatttggtgctgtgggagcatgaggagggagtgatggagaaagtctgtgtttttaagctgatgtttcccagaagtgagcagtttattttaaacagtgttaaatatccctggatcccctagtgaaagcgtaggctctttcatcacttgccctgctgatggaggaggcaagattctcaatttggtgctatcgcatcttaaacactactctctctttttttgtgttttgttttgtttttttttgagacagagtgtcttgctctgttgcccaggctggagtacagtggtgtaatctctgctcactgcaacctccgcctcttcctgggttcaagcaattctcctgtctcagcctcctgagtagctgggattataggcacacaccatcacacccggctaatttttgtatttttagtagagatggggtttcgccgtgttggccaggctggtctcgaactcctgacctcaaatgatcctcccacctcggcctcccaaagtgctgggattacaggcatgacccagtgtgcccggcctccctttcttaactttaaacaaagacaaaccacatctccagtttctaggactctcaggcaggcagtagcatgtcactaaaattcaattactgcctttgtttttcttgtatttagtttttatgttgtattgtatttagttttatggtaagttgattgttttgtttaagtaacacttatataatatctgctatatgccaggcactgttctaaatgctttataaatgttgactaatttaattctcccaaagacctatgaggcaggtgctgtgattatcattactcccattttacagatgaggcccagaaaggttaagcaaactgcccaaggccacaaagcctataagtggcagagctgggatttgaactgagaccagccagctccatagtctgtgtcttgaccagcatggcgcacactgcctatttcatgccagttatctgctgatggtcatgatataatatttttgagacatgtttattggagtaaaaaataggaggcaaggtaaagatcaatagtaagtggataattaatagtagcaccagtgaaaacctcaaacgcaataggctagtggcaggagttctggaacactccagtgtggctgcagggatacagcacatggaccatgaaagttgagttgagaggatgggaggggaaaggtgttggagggcaggagtctgctccagcagaggcaaagatgcatgacgaagcctgggctgccggggagacgatgagtaattcagggcagtcagccagtaatggcaggaaacccgtgcactggtacagcacttcacagtccgtgaagcactaccacatctgctttctcacagcctcttcttcactgccaggtgcagtgagcactattgtccccatttcagagatggtaactgagttcagagaataaaagagccagagaagagctactatttgcttcaagatcttctggcttcaaattctgagcccttttctcaactccactgtgtcagggatctttggtggcaagtgacagaaatagaattcaacatgattaagcaacataggtggtttttggctcatgggaatgagaaatccacagggtggacatcagatatggctggatccaggacctcccatgatgccatggggactcctgacctgtatttctcagtatggctgtcattttcaaggaggctgtctctaagaggtgacaaagatggctacaagctctgagaagataccaaaaaaagtgtcagttttctagagttctagaaaaaaaatctcaggactgctttcactggccttgcctgggttgacatccatccctgatgcaatcactgtggtcagacagatggggtgttttgattggccaagcctgggtcaggagcccactttgtggagcatggggtggagtcagcctcaggcaaaccactagaggcagctcagatagaggagctctttgggaagagacgccgggcaggcagaagcagcaggtaccccctccacatccctagggctctgtgatgtaggcagaggtaagaaattaggagggatgaggagttttttgtttgtctgtttgtttttttaaagacagggtctcactctttcattcaggctggagtgcaatagtgcaatcatggctcactgcagcctggacctccggcactcaagtgatcctccttcctcagtctcccgaatagctgggaccacaggcacacagcacccggctaacttatttttacttctatttttatttttggtagagacaaggtcttgctatgttggtcaagctggagatgaggaatattgaatctgggcaaaggagtttgcactttttgctgtgctgtggtcaagataaaaccatcagggagtgacggggacagagctatgtcaggactcgcaccgtggctggggtgatggatgtggacagaatagtgagggggcagacacagactccccctcctgcgatcagaggccacatcttcaaagtgtgataacaggacctctgcaggggttggaatcacacaggattcatattcctaaaagcaggttgaaactgcatctacctcaacattattttatttgagtagtgatgttattgcttaggatgatgctggagttaaatttttaagtgtgcttatctatagaaaatatattaaaatatgtattaaaataaacaacagtgcacacaatatacaaatatggccaaaattttggatatgagatattttggcaactcttggctagatcattctgagaccccctctgtttctgaggctctaccttctccatcaattacagctgttgtttgagtgtttatgtgatgggggccatctgcagggttttatgcaaatcacctccttgaattctcacaagaagcctggaagcaggccttgctgtttccactttacaaggctcagagagggcaagggactggcccggagccacacagctggtcatctgaaccttcctggccccccagcctgtgccctgccccagggttctttgatggctctgtgagggaggtcagagggaactatggatggggccagagtaggatctttgggaaccccggcacagaggaggaggatcttccccttgtggagtcagggatggcgtctggagaaagccatgcctgtgacttgggtcctgcatggggcatccctcttaggtttagctttagctccattcttgtctataggggctggtctgggaggggctcctgagtctgggcaggtggaccactgccctctggctggcacttcctcaaacagacacagagctggtgggtgaaacagacaagtcccaggagaagcctggcatcgccagactggtggggcattcctctgcccaagacagtagagggcactctttctggataaactcactctgctccccaaagaggttccttctccatcctggcccaaattaggaggtcaggttgtctctgtttggtcaggcctggatttcctagcatgctcccgagtgggctaatctgggctttgtgatggagtaaggagcctcattattgggctaaccttatcttaagtattcagcagtggttaactttgtgggttaactttggatttattattcagtaagaagccaatttattgatggctgggtgcagtggctcatgcctgtaattccagcactttgagaggctgaggtgggtggatcacctgtggccaggagttcgagaccagcctagtccacatggcaaaaccctgtctctactaaaaatacaaaaattagccaggcgtggtggcggccacctgtattcccagctacttgggaagctgaggcaggagaatcgcttgaacctgggaggtagaggttgcagtgagccaagatcgggccactgcactccagcctgggcgatagagtgagactttgtctaaaaaataaacataaaaaagccaatttactggcttttttttacaacatggatgtttataggaaggaagatccaaaattgctcctcagcagatccccctttccaaactagttttttctccttttctctctcccttcctctctttttccctccctctttctttgttagatagataaatacacaagtttaatttcacacacaatgctacatcaataggctcagcaagggcaaaatagtcagcagtctcctccctctttaaattcaccttgtgctgggcgtggtgactcatgcctgtcatcccagcactttgagaggccgaggtaggaggatcatgtgatcccaggagtttgagaccagcctgggcaacatagcaagatgccgtctctacaaaaatgttttaaaaattagccaggcgtggtggcacgtgcctttggtcccagctactcgggaggctgatgcaggaggatcgcttgagcccaggaggttgaggctgcagtgagccgtgattgcgccattgcactccagcctgggcaacagaacatgaccccatctctaaaaatattaaaataaaataataaaacaaattcactttgcatttgtgacgtgatggggcgggggcaggaagaaggtgggagaagggattcttggggtgaatctgccatttctaagaggtgggagttcttggggtcatccacaggcccctcgggatcttgcatttttcttaagacagttccaagaatcgggggcaagtctgcctgggaagagacaggatgagggggaggccgggggagccctgagcccgcctggctcaccctccactgtacgtctcttgcaggcccgtgggagtcagcatgccgcgtggctgggccgcccccttgctcctgctgctgctccagggaggtaagtggctgccccgtggtctgcgggtggggagggcccccatcacagagctgagccagggccgggctggctttctgggctcaaaaacacggctagagtccacagattcagaaaagatgacatccatgcccttgaggctgacacgagtccagtagccggctctccactaatcagaatccatccaccaaagggctccatgaaacagaagcggtagacatgagtctcaggtggcccagcccacaggcttgtgtcttcgggtgtcactggggggatgaaaggcttcgtccttcatttcccctgacctctgccttggctggctcccaactctctgagtgaggaagttctgccttccatctaacctcagtttctccttatgtaatgactctccttggaaatgtttttcaacaattgctgcaccgggtgcggtggctcctactggaatcccagccctttgggaggctgaggagggtaggtcgcttgagctcaggatctcaagaccagcctgggcaacatggtgaagccctgtctctacaaaagaaaaaaaattagccaggcataggagcgcatgcttgtagtctcagctttttgtggggctgaggcgggaggattgcttgagcctgggaggtggaggttacagtgagtcaaggtgacaactgtactccagcctgggcaacagagcgagaccctgtctcaaaacaacagcaacaacaacaacaataaacaaacaaaaaaatcgctagattcttagcaggcactggtggtccctgggctggggacaggaggaagagccaaaaggagactgaaccttggtaggcagcccccagaggaccagatgttgtggttagagggggtgacgttagaaagcagaactgggaagaccaggagtccgactgaaagggcactgcctaggactaagagatcctggagggcttcctggaggagggggccatgaggaggcgggatccagcacagacttgtgtggaggccggcctaggggcaggggaggaactcaacagctgctctgctgactcatgggcatttttctctggtttttaccagaagacccaggacctcaaatagctccttcaggaaacagatgtcaagctttgattttccctttctgagtggcaagcatcctcatcttggttctaaaaagcctttgggtcacccaccatggctccacatctggcgggtgcagataacaagccctggctgcatgcaaagctcggagcgtcatcccattccactgtcccaacagccccacaaggcgcatgttgtaatgacgcccagttttttggctgaggaggctcagagaggctaagagacaggtgcatggccacactacccggaagaggcagagctgggatcagtttgctcttggggtctgtcttagtctgtctgtgctgctgtgactgaatacgtgagactgggtaatttataaataatagacatttactgctcgcagttctggaggctgggaagtccaagatcaaggcaccagcagtagctttgattccggtgaggggcccatctttgctttttttttttgagactgagccttgctttctcacacaggctggagtgcaatggtgcaatcttggctcactgcaacctctgcctcccaggttcaagcaattctcatgcctcagcctcccgagcagctgggataacaggcacatgccatggctaattttcgtatttttagtagagttggggtttcaccatgttggccaggatggtcttgaactcctgacctcaaatgatccacccgcctcggcctcccaaaagtgctgggattaccgcacccagcccccatctttgcctttaagatgccacattgaacgctgcaccccccccagaggggacacacgctgcatcctcacatggcagaagggcaaaaagggtctgaatgttgggttcgtccagccctcttatagcatcaataattcattcaggggggctctgcccccatgacttaatcatctcctagagtccccaccttttaatatgatcacattggcaactgagtttctggggagacacagacgtcaaaccgtagcacggccttcaccatgctgtgctgctatctgtggagtgatagccatgtgcgggcagcatgcaggcacaggcatgatctcatctcaacacctcaacagcctctagggcaagcagtgtctccggcttacacatggggaggagaagcagttttgagtcacatgtttgcagtcacagagctactttgtgcacctctcactgcctcctgcacgctttcataaccccagacatgggatggccctggggctctctgccctgtggctggggtactgacagggcattttcccaccctctcatccctggtgccacctccctgccactcaggggctgccgttgcctccccaagtttggagacaaaccctgtcccttggtagctttgagcctggctaggaatggtagctcctctccaaattcccagagctctgagaaagaaccacgaggatacgaactcagagatgacacagctacttagaggctctgtgttgaggttttgccaaaatcagtcctgttttctccaccaagtgctggaactagctccttttcactccaccgacaagttctgtgtgtctccctgaggaaagccccctcctagagcaagatttacttccatgactcagatcccttggtagccactgcctcgagagaagttgagaagcattccgaggtcacacctaggggagggagtgctgtgatccattagcaatatctgtcatgtgtgcggctatgaaaaactagcacagactaggtatttccttccctgggtgagtgtctcagcagcccagaccaagagagacaagaggcatggtctagtcttggagcctcagtgttctcatctctacaatgaactaaaggatatttccagacacagtattcttggctccgcatataggttctgtcctagagtgagacccaggaagggaatctaccaccaccacctcaggggtcttcattagtccagggaaaataggaaaaagccaccaaaaatgaacctacttaaaaaggggaacaaggtcaggcacgatggctcattcttacaatcccagcactttgggaggctgaggcaggtggatcgcttgagctcaggagattgagaccagcctgggcaacatggtgaaaccctgtctctacaaaaacacaaaaattatccaggcatggtggtgcacaactgtagtctcagctactcaggaagttgaagtgggaggactgcttgagcctaggaggtggaggctgcagtgagctgagatcgcaccactgcattccagcctgggcaacagagcaagagatcctatctcaaaaagaggtgagcggtacaagtttctagtaaatagcagcaaaaaatagtggaattggcactcgaatatacaaaacaaagctacaaattattccattgattttgtccacatttaacaaaatgtagatgatgattgcacccctgttttagaacacagcgaaacaattaatgtttggggagcaggatggaaaggtgttaaatcttccaacaaaattgcctcatagggcaatacctagaagacttcttggtggcggtggcatttttggccgcaggatcacgcagacctttatgcaaaagtgtccgagggctttttaattctctcacggtttcctactccttgaagcacttcctgaatctccgagagtgggtgtcctgtggatccaacttctgtagagccgagacctcttccttgtcagggttttgggacattttcagcatagctgtccttgactctatgaggtcctgaccctcttggggtgtgtgcgtgtgctctggctgggttcctaccacatctggggcatttaggatattgccattctgagtgggagcttggccaggagggacacagacctggtggccgggcgcagggctctggaggagggtgctgagctggggaccagctagttttatattatttgccatcacatgcatcctgtcttcatagccagccttgaaacattggtgctcaaacaaggaatttccaggtggtgaggccccctgggtgccaggcctacatctaagcagctcctgagtcctcatatttgtcccggcctggggacccctgcacccattcttcctccagccctcgaggggatggagaggaagctctgcagtcccaagccaccccccaccaaggcctctctccccactgaccctccaggctggggctgccccgacctcgtctgctacaccgattacctccagacggtcatctgcatcctggaaatgtggaacctccaccccagcacgctcacccttacctggtaagtagccgggcctcaccagtccccggggatgcaattcagggtgcctgctcagtgattcccccaggaggacactgtgcactgaggaccactgtgtccgcctttcagacaaccactcagggctcacaggacttgaaaagtcaggagcccgcagggttggtctatccaccagcttcaaaggccactctctcacccacacaggtcggccatggttttgagaccccgggatggctggtttcccgcatgatttttcaagcacttaggtaccaggcccccaactacacgcttcccatgaatggtcacccccaaccctcacaatgattactcccattttacagatgaggacattgaggttcagagaggttaagcaacttgcctaaggtcacacagccagtgaatgctggagctgggattcaaattcagaccgcccaactccaaagtccatgggtcccttttagaccctatgcagctcaggataaagaagagcttctgttatccatcagctcattcattcattcaaaaccatttataggccaggtgcagtggctcatgtttctaaccccagcactttgggaggccaaggaaggaggatcacttgagcccaggagtttgagaccagcctgggcaacatcacaaaaccctgtctctacaaaaaataaatcagtcgggcgtggtggcacaatcctgtaatcccagctacttgagagtctaaggcagggggaccaagctcaggaggtcgaggctgcagtgagctatgatcacgccactgcactccagcctgggcaaaaaagcaagatcccaactcaaaaacaaaacaaaacaaaacaaaacatgtattaagttcctgccagacactgttgcaggcactggggattcagcagagcaagactgaccaggccccagatgccttggaactgacgtaccacggtggggcggaggctgggggagacagacacacaaaacaaccaacaaggtgctttctcttttttattttattttattttattttattttatttttttgagacagggtcttgctctgttgcccaggctggagtgcagtggtgggatcagaactcactgtagccttgacctcctgggctcaagcaatccctccacctaagcctcctgagtagctgggactacaggcatgcatcaccatacctggataatttttgtagtttttgtaaagacagggttttgccatgttacccaggctggattcaaactcctgggctcaagcaatctgcccacctcagcctcccaaagtgctgggattacaggtgtgagccaccatgccaggcccaaacaggacactttctttctttcttttttttggagacggagtctcactctgttgcccaggctggagtgcggtggcatgatctcggctcactgcaacctccacctcctgggttcaagcaattctcctgcctcaacctcccaagtatctgggattgcatccaggtgtgcaccaccatgcctggctaatttttgtattttaagtagagacagggttttgtcatgttagcccacctggtctcgaactcctggcctcaagtgatccgcccactgtacccgcctttcagacaaccactcagggctcacaggacttgaaaagtcaggagcccgcagggttggtctatccaccagcttcaaagaccactctctcgcccacacaggtcgcccatggttttgagaccccgggatggccggtctgccgcatggccagcctcccaaagtgttgggattacaggcataagccaccgtgttctgccccaaacaggatactttctaataatactgggtgctatatcaaggacagaacactggacctcaggtaaagggaccacaactgctagtgagaaggaggaagccagggagctgggcagagggcactgccagtgcaaaggccctgtgggagaagagctggtgcgtttgaggaatagggaggaggtcagtgtggctggagtggagtgaggcagggtgagggggaataaggagcaagttcaggctgggaggcttggagagcatttattcagcaggaacttgtattccagcaaatttggcagagaactcagtccacacatccctactgggcctagagagtggtcatgttcagatcctgaacatctaggtagggaaattaatatccggtaaactactatacatacttcaaaacccatcatttttgtccagtgggagttaaaaagccacagcattttccctaatcccatcccaccaactttcccagaagtccacccagaggaggagatgaggttcatttagctcttttcctggccctcagcacaggctattattagatattcagtggatttggggactgggcgaggtggctcagtcctgtaatcccagcactttgggaggccaaggctggcagatcacttgagcccaggagtttgagaccagcctaagcaacatggtgggaccccatctctacaaaaaatacaaaaagttagctgggcatggtggtgcatgcatgtagtcccaggtactgaggaggctgaggtgggaggatcagctgagcctgggaaggtcgaggctgcagtaagccatgatcacactactatactccagcctggggccagagtgagaccctgtctcaaaaaaatggatgttggacagaaaggagagaaggaaacccaaaatgcctagcgcccttcctgcaggacagccatctggttgttgggaccaacagggacagatttaggcttagtccaagcaagaatggcccaaatttccaaaattgagagctgctgccctaaatgaggtagtgagttcctggcccctgggaggtgtgcaagctgagcccggacacaattcattgaggatgctgtaggggaggtgataccttccctgggaaaaggttggttggaccaggtgaccaccccccagccctgcctcaaatccctcccagccctgagagtctgggcttctgccctggccctgagcactgagcccaccaccatcccccctgcccctggcttccagccatgaccggctgctttgtccttgaaggcaagaccagtatgaagagctgaaggacgaggccacctcctgcagcctccacaggtcggcccacaatgccacgcatgccacctacacctgccacatggatgtattccacttcatggccgacgacattttcagtgtcaacatcacagaccagtctggcaactactcccaggagtgtggcagctttctcctggctgagagcagtgagtatcctgggaccccaggcttagggtggcactcaatcttagctcaccgcagccctgacctctctgggctcaggtgatcctcccacctcagcctcccgtgtagctgggacaacaggtgtacaccactacacccagctaatttttgtatttttagtagagacggggatcttgccatgttgcccaggccagtctcgaactcctgggctccagcgatccacttgccttggcctcccaaagtgctaggattataggtaggggctgggtcccctactccctgccctctgggccagctctcctccttccatcagatctgacctggcctatgtcctcactacaccttagagttctgttttgagttgcgctattttttactaaagtgtgaaaggttgataataggtttgagaggtattgaaggagctaggctgggacccgggacttctgggttcgtgttccggctcagctctgcccatctgtgtgaccatggatgaggcatacctacctctgggacagcttccctatttgtagagcaaatgtccttttaaccctgactttctgggatcctgaccccataatgaggcgaatggacgacactgagttacagaaaaaaaaaaccctcttgggttttttccccttcataagctccagggaggcctggaatttccctccaggctggaggtagaggggggtcccaggggcaggagggcctggttggtgggagcagttttatctgtgagttcagaattagggcaggtggcagggcgaggtggctcatgcctgtaattccaacactttggaaggctgaggcaggaggattgcttgaacctggggctttaagaccaacctgggcaatatagcgagacctcatctcaaaacacaaaacaagaaccagggcaggggccaggcactgtggctcacgcctctaatcccagcactttgggaagctgaggcaggtggatcgtttgaggtcaggtgttcgagaccagcctgggcaacatggtgaaaccccatctctactaaaaatacaaaaaaatttgccgggcgtggtggcacacgcccgtaatcccggctactcgggaggctgaggcaggagaattgtttgaacctgggagacagaggttgcaatgagccaagatcatgccaccgcactccagcctgggcgtcagagtgagactccgtctcaaacaaaacaaaacagaactaggcagggcatggaagggcctgggaggtggctttggcatggtgtgtgtgtgtgtgtgtgtgtgtgtatgtgtgtacccaaagcggccccagaggcaaacacaggctgcaaagggagcctgccctcaggaaggccccgcccatgagctcgggagtttctgccgctagattcccagcagaggggctggggtataagaggtgtctgtgattcacactctgggggtccaggtttgcacctctttgctgagtggatgtcacaccacagagcgtgagagtgaagcttcacacactcccagacacatgcacactcacgcaaattcccagggtcacagactcacgcacacacagactcatagatgcgccctcaaactcacagatgtctccccagccccagcctgcatggcatggacacagaggcccacactgcctctctctcttgctctctctcactctcatacacactcacacatacatacacacacacacacacacacacgtacacaatacacacacactcacacatatactctcacatcactcatacatgggcacacacacgcacacactcacacatgcattctcacacacgtgtagactcacacatgcacacacatatacactttctcacacgtgtgcacacacgcacatatacacatactcatacactctcacatcacacacgggcacacatatgcacacactcacacatgcattctcacacacgtgtacactcatgcacagacacacacattactcacgggcacacatgcacacactcacacatgcacagactcacaaggggaccctccttgccacttgtcttgcagcgtgaatccaagcatttctctctggcattccctccctccctgccaggatctgcagctagcctggtcccagctggggcaggaagtgattttctaaccacctcccgccgagggtcccttcctcctcctgggccctgggcctcgctgggctgagcagcccctcttcacgacccccaggctctgcaaacatctcccgagtacccacggggcagttctcagtaccctggtgtcttctgggactcatcctcacccagccacacagggaagccgagagccggcctccacctgccccggggaagacaaaagaggggttagaaacgatttcagtcaaaaacatcccattactggaacagcaacagcaacaacccagtgttcaccatggcattctgtaaaatgtgcacctctgtcacctcggggcgtggtgggagccctcagtgcgggtttcaggatcacaggcagccttagagctcctttctggaggccttgcaaggttcattagttaatctgacaaatatatatatatatatatatatatatatagagagagagagagagagagagagagagagagagagagagcgagcgagcgcgcgccagggtgtagctttgtcctccagcctggggtgcagtggcacaaccatagctcattgcagcctggaactcctgggctcaagcgatcctcccacttcggcctcctgagtggttgggactacaggtgcacatcaccatcctggctaatttttaaattttttgtagagctgggatcttgctgtgttgtccaggctggtcttgaacacctggcctcaagcaatcctcccacctcagcctcccaaagtgctgagatttttggcatgagccaccttgcccagcctaatttgccaaatatttattgagggcctactgtgccccaggctgtgttctaggagctgtgggcacagactgaacctggaggacaaaacctctgccccaaggagctaagagcccagtgagggaggcacatagtaaacaaaatcacagggtgagaggtgcagagtgttagatggtggcagattgaaagtgaagaaggtggctgggtgtggtggctcacacctgtagtcccagcactttgggaggttgaggtgggtggatcacttgaggtcagaagatcaagaccagtctggccaacatggggaaactacttctctactaaaaatacaaaaattagccagtcatggtggtgcgcacctatggtcccagctacttgggaggctgaggccgtgtaatcgcttgggcttgggaggtggagactgcagtgagctgagatcacgccactgcactccagcctgggtgacagagattctgtctcaaaaaaaaaaaaaaaaaagaaagaagagaaaaaagaaagggagggagggagggaaggagggagaaaggaaggaaggaaggagaacaaaaaaagaaaaagtggagaaggtgagggcagaggcctgcaactcctctctgacactaatagacacttgtcactcagttcctctgaagttactgccttctgctaaatagcttcatccctttgaacttgaagccccatgatataggaactgagcccattttacaagagaggaatttaaggcccttaacatattgtgttctgctcaagttcatgaaatgtccttcgaatggagcaaaaacagaatgccggctttgaccttcacctggaggccgcccatgaaagcttgctgttatggctcagagctcggctcttgcacttgccaggagacgctgaaagatgaggaccatcagattggcctcccagggccactgtggggtgtcaaactgcccagagcagggcagccaggcaggctctgtgtaaatggcagccctcaccattagcattcatgctaagaagagtcatcaactgcttgaagtagctggggttgaaagaaaatgataccatcatttagaacagaaatggaaaatgaatggatttgccagcacgttgctgagaacatttttggatgggttgctaactttaaaacttaatataggccaggtgcagtggcttgttcttgcaatcccaggattttgggaggctgaggtgggagcatcacttgaggccaggagtttgagaccagcctgggcaaagatagtgagaccccatttctacaaaacagacaaataattagccaagtgtggtcgcatccacctgtagtctcagctacttgggaggctgaagtgggaggatggcttgagcccaggaggttgaggctgctagtgagctatgatcgcaccactgcactccagcctgggcaacacagtgagatcctgtctctagggggaaaaaacccttggagatttcacatgataattccaggggtctcccgtttcccattctgcacctcatattgaaacttgcccttcagtgcatagaaagcagggtttcagatttcatgtgtgtgcgtgtgcatttgtgtgtgtgcatgctgtgcgtgtgcatgtgtgttgcatgtgtaggcatgcgtttgggtgtgcatgtgtgggcatgcatgtgtgtgggtgtgcatgtgcacatgtgtgtttgtgtatgcgtgtgtgtaggcatgtgcgtgtgtgtttccctagaaaacttagaaaagctgaccactctgtgctgctggggccattcacttttaactcttttatttatttatttttgttcgtttttgagatggagtctcgctctgtcgcccgggctggagtgcagtggcgcaatcttggctcactccaagctctgcctcccgggttcacgccattctcctgcctcagcctcccgagtagatgggactacaggcgcccgccaccacgcccggctaatttttgtatttttagtaaagatggggtttcaccgtgttagccaggatggtctcgatctcctgacctcgtgacccacctgccttggccttccaaagtgctgggattacaggcatgagccactgcacccagccagactgttttatttcgtcacagtccctaaacctgcttcactcctctctgtgacctgcccgcccctgagtttgcaatcctgatcaggtctaaatctcccaggtcccagatgaataaactgaagcccagagttgggagtactttgcccaaagtcactcagggttgttggtcttcatctcatccatgatgggtcaggcatggaggcaggggtgggggcaggcaggacttcctcccatcaccaaatccttttcacctgcagcaaattctcaccccattttcttttcctgggtttttccaccaagtcaagccggctccccctttcaacgtgactgtgaccttctcaggacagtataatatctcctggcgctcagattacgaagaccctgccttctacatgctgaagggcaagcttcagtatgagctgcagtacaggaaccggggagacccctgggctgtggtgaggaatgtggggatcagtgcagctttgtgggaggggaggggagatgacggagtgcaaaggcatctgggtgggagagacgggtgaacaacatcattcatggccaagaacagagaccaagggcacgagcactcccttacagcgggccctcctcctcccctcacttctccccaaggtaggagacccctgaataatctgtcctccccaaactggtctcctcggcggtcagcatgccaaagagactgtcccttccccagactccaccccaggtctagcatagtcacaatagaagaagtttcagaaatggggcaacctggaagcttcccaattgcttagaatggccatagttggagagttccagaaatatcaattattaagaaggtccagccaggtgcggtggctcatgcctgtaatcccagcactttggaggccaaggcaggtggatctcttgaggtcaggagtttgagaccagccagggcaacatggtgaaactctgtttctactaaaaatacaaaaaattagccaggcgtggtgacatgcacctgtaatccagctattctggaggcttaggcaggagaatcacttgaatccaggaggcggaggttgcagtgagctgggatcgcgcgctactgcactctagcctgggcaacagagtgagactcgatctcaaaaaaaaaaaaaggtccagtgttagagggcccattgtttcaaacatgaaggtgttgagtgatgtccttccagcccactatttagaacagtcacaagtgatgtactgtctctaaaaaataaaaaatagtaacaatgatagaacagtcacagctgaagagttctagaattgcccatcctttaggatagtcccagctgaagatgtccatgagtgccatactttagaaagtccccagtggaagacttccagaggtatccattgctaagatgtctgtagttagagttctagaaatgcctgctgttgggaatgtcagtatgtcaactcttggaattcttcaacagttgaagacattctccactgatgtactgagacttatatcagtagtacatcggttgagaatgtcctcaactgttgaagaattccaaaagtatgcattgcctggaatgctgccagaccattaccactcctgagatatgcccagtcctgcagggagagtccactgccaggactgtgagtggctgaattggatcaaagagaaatcaaacagagcatcctatcacatgcacgggccaggcagtgctggtgagtctgtgctccccatgcctgagtccagctactcaggcataggcttgattcttgtgggaagagaagagacactcagcccctttgatggaagctgggaaaagaggtggctctgctggaggcaggggctggcctggtttaaccctgacctggtgcatcctttccttgtactggcagagtccgaggagaaagctgatctcagtggactcaagaagtgtctccctcctccccctggagttccgcaaagactcgagctatgagctgcaggtgcgggcagggcccatgcctggctcctcctaccaggggacctggagtgaatggagtgacccggtcatctttcagacccagtcagagggtaggtgtgaagctgggatggacaccccactcctggtatcaaattttgtcctgttctagccaccctaagccctgagctttctggcacagctgggaggtattcagttgttcatcctcagatgtagcccttcaattacatttctagagcccctgctggccaggccctgttgggtgccagctgcttcttctgttaggcatttgatccccctaactctgaagtgggaatcagccctgtttttcagacgagataacttaggctcagagaaatgaagttacttgcctggggtgaggaatgagaacaagatttgaacccagatccatctcacttcaagacactagcagtaacagcctctcctaccctcttccactctaccccagacccatttcccaccatgcccaccccatatggcctctggtagagttggtgccatttaaccctttctttgcttccttcccagagttaaaggaaggctggaaccctcacctgctgcttctcctcctgcttgtcatagtcttcattcctgccttctggagcctgaagacccatccattgtggaggtgaggccaggggatgaggaaggcagggaggtggtcagcctgggccactgcccctgtatgatacatgcagggttggaaaacatgactgtcatcatggtaacaatgatgatgatgggataataaccaactcacagccaccatgtgctggacactgtggagggcactcccttcacccccatggctgccctatgagcttgagacactgcagttgcccttattttacaaatggagaaactgaggcaaggagatgtcaaggacaaagtcacacagctccaaggtggagaaattgggattgaaaatctgtgcccttaaacagggacctcagctgtgatcttgtccagtggattttaagctttgaggcttaatgggcttaaggggccactaggtggtggtgaagaggtggctgtaatagtccacacctctgaaatggcctctctgcgcacccctggttgcagataaagaagttgaggctcagaaggggcaacatttgcccagcacgcaacaggcagccaagaacataaccacgatatcccttcaggagcctgtgagggagacttactgctcccattttacagaaggggaaaccaagccccagggaaggagggaggcgcctgggctgagtcttgggatgctcggaagctcctgtaggatgaagctggggagcgtccgaatgggaggccaggctgccctctggtgatgtcagggtcctcacccctctctgccccctcaggctatggaagaagatatgggccgtccccagccctgagcggttcttcatgcccctgtacaagggctgcagcggagacttcaaggtgagctcccgaccctgtgatgagctcctcggagcccctcctcctcttcaggagccccacctcccctcaccccaggctccccagcctcaccccacaggcctagagcatgcaggtctcagccaagccacaagccaggcctcagtttccccatgtgcaaagtgtagacagtcattcttgtggtgcagaattggcagaagaattaaacaagatttgaccaggtgtggtggctgacatctgcaatcccagcactttgggaggccaaagcaagtggactgcttgaggccaggagttcaaaaacagcctgggcaacatagggagaccctcaccaccactccgcctccccatctctaccaaaaacttaaaaatcattcaagtgaggtggtgcacgcctgtagtcccagcaactcgggaggctgaggcaggacgatcgttcagaggctgccgtgagctatgatcacaccactgccctccagcctggccaacagacagagactatatcttaaaaaaaaaaaaatcaaaaagaaaaagtaaacaaaataatgcagcattggcccagcccaaggaaccagactgggatagggggtgaggctggtggtctcctgagtcacagattgccccactggtcctttcttaggtgtccttaatctgagttggagagggaatagattctggaaagagcctggcccacggggcaaaacacactaacgtttgccaagcctccaactcaccaccacccgccagcacccacaggttgtctgtgcccatttacagccgtgtcacccaccctgcagcagtgggagtggctgccacagagaggatgtggtgacagaggtgggagggccagccccacctgctgcagcccagcctgaaagtcagacagtgtagacctagaccattgattgagctcctgctgtctgcctggtgctgcgctggacacccttcctgcctcactcattctcatattcacagcagcccctgcagagtggatgttccactgcccccagggcacccatgaggaggccaaagagtgggcagggaggaacatggaccccaacccacataagacccaccctttcctcttccctaaagctcaaatatcacattgattttgggttgatttttaccaatactcatatagcacttgctatataccaggcagtcccctaggagcatcacaaacagtgactcatttaatcctcacgacggccctacgggtgggtgctattattaggtccattttacagatgaggaaactgaggcaccgagagggtaagtaattggcttaagggcacacagctgagaagcgactttgaatcagtggtggtggccacatcacagttctgagatgagtttttgaggaagatgagctcaaaacagggagatacccattcctggggattttccttgccaattgcatgaggattctggtgtcgtgagtgggagtcctggcaggggagggaaggggagggtccttcaagtttaagggccaccgcctcagccagcatcacccacatcctttatcctcaaagtgtacaaaggcctttccaagtggcttttcattgatccactccacccattcatttcgttaataaacatttattgagcacctactttgtgctaggcactggggctacagccatggacagaagagacaagacttatgtccgggggccaagtgtctgtctggtggggacacataaaccaggagagtgctaggtttcaagaagcatcaaggaggcgggaaagcaggagatggctcaggggtacctcagacctcaggccctcctgcccccatgtctccttgactcaggaatcttggtccctgcctggactatggggccaccagttgtctgactggtcacactactaagggtagcaactcccttctacaagtagggaaactgaggcccagagtaggagggggatccactagggtgggagcacattgtggtcctgattcctctctctctctctgtctctcggtgtctttgtctatcttcatgtctctgtctgtctctcttgatgtctctttgtcttgtctctgtgtctgtgtctgtctttctgtctgtttaaaccctcaccttggctgggcacagtgactcacgcctgtaatcccaacactttgggaggctgaggcgggtggatcacctgacgtcaggagttcaagatcagtctggccaacatggtgaaaccacgtctctactaaaaatacaaaaattagccgggtgtggtgacaggcgcctgtagtcccagctacttgggaggctgaggcaggagaatcacttgatcctgggaggcagaggttgcagtgaaccgagatggcaccactgcattccagcctgggcagcagagccagactgtctcaaaagaataaaagtaaaagaaaaataaaccctcaccttaccctcatcctgtgctatgactctctctttttctctctcacagaaatgggtgggtgcacccttcactggctccagcctggagctgggaccctggagcccagaggtgccctccaccctggaggtgtacagctgccacccaccacggagcccggccaagaggctgcagctcacggagctacaagaaccagcagagctggtggagtctgacggtgtgcccaagcccagcttctggccgacagcccagaactcggggggctcagcttacagtgaggagagggatcggccatacggcctggtgtccattgacacagtgactgtgctagatgcagaggggccatgcacctggccctgcagctgtgaggatgacggctacccagccctggacctggatgctggcctggagcccagcccaggcctagaggacccactcttggatgcagggaccacagtcctgtcctgtggctgtgtctcagctggcagccctgggctaggagggcccctgggaagcctcctggacagactaaagccaccccttgcagatggggaggactgggctgggggactgccctggggtggccggtcacctggaggggtctcagagagtgaggcgggctcacccctggccggcctggatatggacacgtttgacagtggctttgtgggctctgactgcagcagccctgtggagtgtgacttcaccagccccggggacgaaggacccccccggagctacctccgccagtgggtggtcattcctccgccactttcgagccctggaccccaggccagctaatgaggctgactggatgtccagagctggccaggccactgggccctgagccagagacaaggtcacctgggctgtgatgtgaagacacctgcagcctttggtctcctggatgggcctttgagcctgatgtttacagtgtctgtgtgtgtgtgtgcatatgtgtgtgtgtgcatatgcatgtgtgtgtgtgtgtgtgtgtcttaggtgcgcagtggcatgtccacgtgtgtgtgtgattgcacgtgcctgtgggcctgggataatgcccatggtactccatgcattcacctgccctgtacatgtctggactcacggagctcacccatgtgcacaagtgtgcacagtaaacgtgtttgtggtcaacagatgacaacagccgtcctccctcctagggtcttgtgttgcaagttggtccacagcatctccggggctttgtgggatcagggcattgcctgtgactgaggcggaacccagccctccagcgtctgcctccaggagctgcaagaagtccatattgttccttatcacctgccaacaggaagcgaaaggggatggagtgagcccatggtgacctcgggaatggcaattttttgggcggcccatggacgaaggtctgaatcccgactctgataccttctggctgtgctacctgagccaagtcgcctcccctctctgggctagagtttccttatccagacagtggggaaggcatgacacacctgggggaaattggcgatgtcacccgtgtacggtacgcagcccagagcagaccctcaataaacgtcagcttccttccttctgcggccagagccgaggcgggcgggggtgagaacatcaatcgtcagcgacagcctgggcacccgcggggccgtcccgcctgcagagggccactcgggggggtttccaggcttaaaatcagtccgtttcgtctcttggaaacagctccccaccaaccaagatttctttttctaacttctgctactaagtttttaaaaattccctttatgcacccaagagatatttattaaacaccaattacgtagcaggccatggctcatgggacccaccccccgtggcactcatggaggggggtgcaggttggaactatgcagtgtgctccggccacacatcctgctgggccccctaccctgccccaattcaatcctgccaataaatcctgtcttatttgttcatcctggagaattgaagggaggtcaagttgtttgtcaatgatttgtcagagaacctgttgaaatgtgaattaagaagctaagaaaatatttcttagcaacattttctttttcttttttttttttttcttttgagacagagtctcactctcgtcgcccaggctggaatgcagtggtgcgatctcggctctctgcaacctctgtctcccgggttcaagcgatttcctgcgtcagccccagagtagctggaattacaggcacacaccaccacgcctggctagtttttgtatttttagtagagctggggccaccctggcccggccccgtcttcctccccaaaggtcagactgcaggctgcagggctgtgctggaggagccagctctagctcacccatgcttttgcaacagggtcgggttggaagtcagcacaggtcagtcctgcggaaggttccttcgtgactcatctgtgaagtggggtggttgggagaggtagctgagagaatgcatgagagtcctcggtgcctggcaggaggctggaaggttctagaacactgatggttataagagtgggactgtgagcctgggatcggggggtgtgagacttggatgggagcacaagagtggaaacacagcttctgcacggagcaggcgcagccctcaacaccccgtgcacctgcaccctagggactcttgggtccagatgtgctgtggttttcacaccttcttgggggcaacaggttccaggagccacctgtgggtgccacctgagccacaggctcccaggaaagcagcacagctctcctgcacccagagcttgctgggtggcggaggggaacacagatggttggggaaggcctgaggccagattgggggactctggactggggcagatgaggctcctcagaatcccacctttgaagggaactcagcttataaacacagaggagcaaagttggagggccgggcgtagtggctcacacctgtgatctcagcactttgggaggccaaggaaggtggatcacttgaggccaggagttcgagaccagcctgggcaacatagcaaggccccatctctacaaaaattattattttttaaaaaaattagccaggtgtggtggtgcttgcctatagtcccagctactcgggaggctaaggtgggaggatcgctggagcccaggaatttgaggctgcagtgagctgtgattacaccgttgcactccagcctgggtcacagatcaagaccctgtctcttaaaaataaaagttggagacaagagctggctcacctgaaaggagggattagtaggtaggagggtggatggaggatggatggatgtgtgggtggataggaagatggtattaagttggtgcaaaagtctttgatattactcttaatggctttaataaaaagcttgaaggaagaatgattggttggatagacagagataaatgcatactggaaacaaagataaagataaaacacaagttataccaggccagcaactctattttgttcactgcctttagtcccagcctggcacatagtaggcactcaataaagcctgatttgtagcatttgcttatttccatggtgtaatttcatgctcctgatttgagtctaaacacagagttgggaagagatatgcacaatctgccctcttggctggtatgagtgagtcccagctcaccgatggtagcccagagagaacatcaagaggggtagggggcttcagggaggaggtggtgttggttggacttcgaaaaatgaataggaggctgggagtggtggctcatgactgtaatcctagcactttgggaggccgaggcgggcagatcattagaggtcaggagtttgagaccagcctgggcaacgtggtgaaacccagtctctactaaaaatacaaaaattagctgggtgcggtggcgggtgcctgtaaccccagctactcaggaggctgaggcaggagaatctgagagatggaggttgcagcgagcagagatcacaccactgcactccagcctgggtgacagagcgagactacgtctcataaaaaaaaaaaaaaaaaaggaaaaatgaataggcgttgttagatgtaccagctatttggggcagagggaagagcttggacaaaggcctggaggtacgaccaagggtcaggagcaagtgggacaggcgctcctcgccctccaaagaccaggccagaattgctgacaagactcactgaagaggaagggggaccgatagcaacgtcactttcccagctgccgcattcctcaccttgccgtctgcaagctctgaggggcagagtcatccgtctgacagatgaaatgaaggcacagctcaggctggtgacctgcctgaggtcacacactgaatgagtggtcggagctggaaccagaactctgggcttctgatgccactttcagctctttttcaccttgctctgctggaacgtacctagatcaagaggtgaggaaggtttagcagacgccgtgggtgcctgctgcatctgcctgtgcagcagtttggagacgtggctgaccccagctctgggagtggctacgtgaaccaggcctgcccagtaggacatttcttccccctggcaacagtacagtttagggacagacataccctagctggtccatgctctctttctgctgggattactaagctgtaaggagggtactgggaggggcagcaagaaacacacaagaaagcagagctgagagatggtaatagctcttgagatcccggatccagccatgcctgaaaccacgtttctcctggaccgtttagatacatgagtatggaagtcattatgctgttcaccatatgctgggcacatggcaggattgtacatcctgaccctctgtagccagatggggccatgtgactggctgggactgggcagttgtgagcagaagtgataagtctcacttctgggcagagcatttttcagatggctaccacaccccctggggtgtttttcctctgtcacagagacagatgatgatggtgactgctccatctgcctgggcacctgggtccttgagcaaggagatacggactgaagtttcagttcacttgtgatagacgtgtatcgtgagcaaggaatcaatcctttgttgttctaagctgctgagatggggctgtttgttaccacagcataaccctgcctaccctagctgaatcaatgagctgataaatttccttttttgcttaagctggtttgaggtgggtttctgtcccttgcagcagaaagtgttctagcattattctgatattatccccacagtaaggactctccttctatcctaaggaaggaccttgtattagtccttgtgtcactataaagaaataccaggctaggctgggatcacgcctataatcccagcactttgggaggccgaggcaggcggatcccttgaggctaggagttcaagaccagcctggccaacatggcaaaaccctgtctctactataaatacaaaaatgagtctggcatggtggcacatgcctgtaatcccagctactcaggaggctgagacacgaggatcacttgaatccgggaggcagaggttgcagtgagctgagatggcgccactgcactccacgctgagcgacagaaagatcctgtctcaaaaaataaaaaagagaaataccagggtctaggtaatttacaaagaggcttaattggctctcagttctgcaggttgtgcaggaagcatggcaccagcatttattctgggtgaggcctcaggaagcttccaatcacagcagaaggctaagggggagcctgcgtgtcacctggcaagagtaggaggaagagagcaaagtgggaggtcccagactcttttaaacaaccagattggctgggcacggtggctgacgcctgtaatcccagcactttgggaggccgaggtgggtggatcacctgaggtcaggagatcgagaccagcctgagcaatatggtgaaaccccatctctgctaaaaaaaaaaaatacaaaaatcagctgggcttggtggcttgtgcctgtagtcccagctgcttgggaggctgagacaggacaactgcttgaacccaggaggcagaggttgcagagagccgagatcacaccactgtactccagcctgggcaacagagccatactctgtctcaaacaaaacaaaacaaaacaaaaacaaacaaacaaacccaccagatctcccatgaagtgactgagcgagaacccactcatcaccaaggggatagtgctaagctgttcaggagggtctgcccccatgaatcacctccccgcaggtctcacctccaacgttgagaatcacagttcaacatgggatttggaggggacaaagagccaaaccatatcaccccattcaaagggcccagaagaccaggctccaagggcaagtcatttgctgtcgctgcgcctcagttttctcttttataaagtggaggttaggaatcagcctcttggcttgctccaggaatgaaaacagagggtggagcaagcccttattagatgtcagttgtcttagtgtttttgtttgttttttgtttttgttgtttggtttttagacagagtctgacactgtcacccaggctggagtacaatagcgtgatctctgctcattgaaacctccgcctcccaggttcaagcaattctcctgcttcagcctcctgagtagctgggattataggcacgtgccaccacacttggctaatttttgtatttttagtagagacggggtttcaccatgttggcaaggctggtctcgtactcctgacctgaagtgatctgcccgcctcagcctcccaaagtgctgggattgcaggcgtgagccaccacgcccggccagaggtgcgttgtctttctatcatcaccttgagctaggctccaggtcagaggagaagagggctgtggccccagcccttcccaatctccttcccagagagttcataaatgcttccctccagatgccttgaagcttgcactgctttctgctgggattcaacgaacacataaccccagctctccaaccatcaacagttcctgcgagatctcagcctgggatgctgtctgggggtcccagatgctctaacaagggaaggagacagagggaagtgaaggcccagaaaaaggcagtgatttgcctggagtccatcatgctctgccccattcctgagcttcttttggtccccccgctggaggtgaaagccccttcctccctcctatctggggatgttgtttgcctgagcccggctgctggccccatggtatggcacaaccctgcacagcccacccagtcccagggcaccggtggaacccaagaaggggacttccggtggaagatggagcagtgagcacgtgcactgcccctcccaggagcccattccactgacagtaaaggaagcaggcgcttcctttaaactctcgacaggaaagaaagcaggcgcttcctttaaactctcgacaggaaagaacaaggagaggacttgtctgccatcaggaaacacccacgcattcgtgtaagatgagaggatggagtcaagtctgctcggacgtcaccttctccactctgggttgggtcctttattcaaagtgcaacaccccactgcctggttttgttttttccatcacacttattataccttctcatacatttgtgttatttatccatcatatttactgtctatcgccactacagcagggatctaattctccgctgggtctcagagcctagaatagtgcctggtatagagcaggtgctaaaaaatattgaataagtgaatgaatgaatgaatcaatcaatggtagagcagtgactggcaaagcagtatggagagaggaggcaaccatctgccccagacctagaaagggcacagaatgaggtgtggagatgaaaacaggccgcctcctggggagtctgtaatgagagcaagagcccttccttcattgctcagaccatggggcaatcataggtcttccccctgtgtctaagggtgacaaatgtgaaggtttttctttcaaaaatcgatggccccaggccaggcgtggtggctcatgcctgtaatcccagcactttgggaggccgaggtgggtggatcacctgagggcaggagttcgagacctgcctggccaacgtggcaaaaccccgtctctactaaaaatacaaaaattagctaggtgtggtggtgggcgcctgtaatcccagctactctggaggctgaggcaggagaatcacttgaatccaggagccggaggttgcagtgagccgagatcgcaccactacactccagcctggtcgacagagtgagactctgtctcaaagaaaaaaaaaaaattgatgaccccagataagaaaccctttcatcctactctttagggagtctcccagcacaatgctggctccccccccaccccaaaacaaatcccatccctggaaggcggtgtgatggggaggtccctgaggctggcagactgggaataccagcagatccgctttccagcctccagccctgtggacatgattttacctcctgcacctcagcttcctcatctatgaaatgagtatactgatcaggcagacgtcttagggctgttgtggggccagaagttaatgtgtgtaatgtgcccagaacagtgtctggcatctggcagatgctcaggaaatcttgttgctaggatatcatccattttatggataagtcatgccctgccccagtcagttcttactggcctcaccctggagcctgtatggaccaagagcacctgacatttggaaaccaaggcgaagtaatgggaaacagagacgcttgggtggctgctgccacctgctggtaagcactgcaatatgcaggtgtcggctgaaggcagtgcccgctcgctctgctgtccagggggaaagggccacagaagtgcatctgcctggcgcttataaaggggaccctggacaatcaccacagcagccctctgcggtagagaatacgggcgatgaggacagggtgaactggcaggggtttgcttaattcaacaaaggctgacttctaccctttgggtggatggacctgcgttgggcattggaggtaaggagggagactccacgcaggcacatacatgcacactcacacacacacatgcccacacacaaatacatacatacacagcatgtatgtgcacagatacacacattcgcgacttcaaaacgtttgtggaggccgggcgcggtggctcacaccaccaacatggagaaaccccgtctctactaaaaatacaaaattagccgggcgtcgttgcgcatgcctgtaatcccagctactcggaatctgaggcaggagaatcgctggaactcgggagacggaggttgcagtgagtccagatcacgcaattgcactccagcctgggcaacaagagcaaaaccctgtctcaaaaaaaaaaaaaagaaaagaaaaagaaaaagaaaaaaaaaaagttcatggaaaatgaattcaaagattaaaaataagaaacaaactgtctttctcaacataagttccatcaaggtcaagacactttggtgggcgatgagaccagccattcagcccctccctgaaaaactgagggtcctgggaattttaccatggcaatgccatctttttacattattaactgaagaaaagtgccctttaaagttttttttttcttttttaggaaacaaaaagaagtcagaaggagccatatcaggactataaggtgagtgcctaataatttgtcatggaaacgcttgcaaaattgcccttgtttgatgaggagtgagcaggggcattgctgtagtggagaaggactctctggtgaagctttcctgggtggttttccactaaagctttggctacttcctcaaaacactcccataataggcatgctgatgcagatgtgccagggggtcggtgagtgagccgtgctgagggcgtgttttatgttacaggcccgggcttcccagggcgtgcacagacagatatggatggaaatgggaagagggaaagtgggaggggccctgaaggagaggggcccacaggctttagccagatttgaaatgttgtatttaacagacaatgcattcatgtatttgcttatctaagaaaaagaaaaaagaattaagagtgaggagggcaagactggggggtatatggaagctggggacacaaagccaaggtgtccgggcctcgtgcaggtgcccatctgggctgtgcattccctggcctctctgcaggagaccaggagccaccacctagcactgttctggcagctgcaaaagggccagagacccatttttgccccttcgtaggttttgtttggtagttagtgcttaatgtttctttcaaatttgcattccttcacagcctgggcatacacattttagttttccacagttgctatcactccctagtatttaacccaaggcccctttcctctcatttgttacctgcctggcccctgaaggcatctcagctcacaactactggtcaatgctgtggcttctggagatttctgtgcagagcttggaggggcagagagctgtcttggaaggatggatggatggatgggtagatggatggatggacagatgaatgaatggatgggtaggtggatgaatggacagatggacaaatgaatgggtggatgggtaggtgggtggatggatggatggatggacagatgagtggatggatgtgtagatgaatgcacagatgaatggatggtgggtggatggatgggcgaatggatggatggatggatggatggatggatgggtaggtggatagttgggtggatggatgtgcagatggatggatggacagatgggtgggcagatgaggggcttcatgatgggtaggagggaggggaagaagcaacagattatccttgggcagaatggggatgtggactggtgttcacagaagccccatttcaccatctgagagctgtccccaccatccctatgtcccatctcccaacacatgcccacactctccatcatctgggaggcacaggcaaagaaggaaacttgctgaacccgactatgcacttgcatccggtgctcttcagctcatctggccctcccttgagggagatactcttcccccagttttcagacgacaaaacgaaggctctgaaatgtgaatgcagggtcagttttttaggaaacacttactggattcccaaacctttcttccaccatgccacactttcccaaataattagtatttgtacagtattttatttatgaagcagaccacatccactattctacttgattgcctcaaaaaatcccatagaacactattgtttctacacttgaatgaaactttaaagggaaaaaaaatagacactaagacctgaccaggctaggcagtgcggggactcactctcaggactctgactcccaagtccctgcctttgtccctcctcatccagaagtgtggcccagagtgaccagggccctggtccctcgtagagggaggatggagacataggttggaaggtgggtcaggtcaggggtacatgttccccagaggggacacttttctaggtgagagaagctgcaggtgggtgtgagacacagctggccaggtcggggcacatcccacctagagggagtggcctctgcttagcacttctgactgccacaggcaggaagctaagcccattgttactggaactttccattttaagagaagacagaaatctgaattttttttaaaaaaatgtgaactctacattttaaaaatgttggcaactaacttaaaaaaatgtaacaatgtgagctcaagagaacttcaaggggccagacccatcccgcaggccctgccaacaccagctgtgctgagctgagctgatcgtgggcctggcactgggctgggagctgctctgtgggggacaggcctgggaccagctgagaaggtggtgagggagctgcctgtgcccctctccatcctggaggccatctctcacctgctggctgaggctgggcggggctgccgagcttaggatcagggccttccctcttcctttggtttcaatgggaacagccattccaggctgttctgcagccaaagcagggagtcccctaggggaatcactgattctttaggaaacacacaaaacagaatgcattttacttccctttaatcaaaaaataaataagtacactccacagggactttttttttttaatgaggaaaaaaggtgaaagaacaaaataaaacaaacaaaaccaaaacctacagggactcttcatttctggcctgcaaggaatcaccagccaggctgagggacacggacagccagcccagctggggcctgccaggtgactcacaaggctgaaaagggagccgctccgctctgggtggttcagtcccagccaggggttgggatgtcctgcctgcggaggggccacagcccccatggggggcccctcgcagcggggcacaccgatccctattctgcaaggtgtatcccacaaggcccttcctcttggtggcacc

SEQ ID NO: 304 - DNA, 3509 bp, Homo sapiens
tgggtggcagccagcggcctcagacagacccactggcgtctctctgctgagtgaccaccctcatctgtcacccccacgctgaacccagctgccacccccagaagcccatcagactgcccccagcacacggaatggatttctgagaaagaagccgaaacagaaggcccgtgggagtcagcatgccgcgtggctgggccgcccccttgctcctgctgctgctccagggaggctggggctgccccgacctcgtctgctacaccgattacctccagacggtcatctgcatcctggaaatgtggaacctccaccccagcacgctcacccttacctggcaagaccagtatgaagagctgaaggacgaggccacctcctgcagcctccacaggtcggcccacaatgccacgcatgccacctacacctgccacatggatgtattccacttcatggccgacgacattttcagtgtcaacatcacagaccagtctggcaactactcccaggagtgtggcagctttctcctggctgagagcatcaagccggctccccctttcaacgtgactgtgaccttctcaggacagtataatatctcctggcgctcagattacgaagaccctgccttctacatgctgaagggcaagcttcagtatgagctgcagtacaggaaccggggagacccctgggctgtgagtccgaggagaaagctgatctcagtggactcaagaagtgtctccctcctccccctggagttccgcaaagactcgagctatgagctgcaggtgcgggcagggcccatgcctggctcctcctaccaggggacctggagtgaatggagtgacccggtcatctttcagacccagtcagaggagttaaaggaaggctggaaccctcacctgctgcttctcctcctgcttgtcatagtcttcattcctgccttctggagcctgaagacccatccattgtggaggctatggaagaagatatgggccgtccccagccctgagcggttcttcatgcccctgtacaagggctgcagcggagacttcaagaaatgggtgggtgcacccttcactggctccagcctggagctgggaccctggagcccagaggtgccctccaccctggaggtgtacagctgccacccaccacggagcccggccaagaggctgcagctcacggagctacaagaaccagcagagctggtggagtctgacggtgtgcccaagcccagcttctggccgacagcccagaactcggggggctcagcttacagtgaggagagggatcggccatacggcctggtgtccattgacacagtgactgtgctagatgcagaggggccatgcacctggccctgcagctgtgaggatgacggctacccagccctggacctggatgctggcctggagcccagcccaggcctagaggacccactcttggatgcagggaccacagtcctgtcctgtggctgtgtctcagctggcagccctgggctaggagggcccctgggaagcctcctggacagactaaagccaccccttgcagatggggaggactgggctgggggactgccctggggtggccggtcacctggaggggtctcagagagtgaggcgggctcacccctggccggcctggatatggacacgtttgacagtggctttgtgggctctgactgcagcagccctgtggagtgtgacttcaccagccccggggacgaaggacccccccggagctacctccgccagtgggtggtcattcctccgccactttcgagccctggaccccaggccagctaatgaggctgactggatgtccagagctggccaggccactgggccctgagccagagacaaggtcacctgggctgtgatgtgaagacacctgcagcctttggtctcctggatgggcctttgagcctgatgtttacagtgtctgtgtgtgtgtgtgcatatgtgtgtgtgtgcatatgcatgtgtgtgtgtgtgtgtgtgtcttaggtgcgcagtggcatgtccacgtgtgtgtgtgattgcacgtgcctgtgggcctgggataatgcccatggtactccatgcattcacctgccctgtacatgtctggactcacggagctcacccatgtgcacaagtgtgcacagtaaacgtgtttgtggtcaacagatgacaacagccgtcctccctcctagggtcttgtgttgcaagttggtccacagcatctccggggctttgtgggatcagggcattgcctgtgactgaggcggaacccagccctccagcgtctgcctccaggagctgcaagaagtccatattgttccttatcacctgccaacaggaagcgaaaggggatggagtgagcccatggtgacctcgggaatggcaattttttgggcggcccatggacgaaggtctgaatcccgactctgataccttctggctgtgctacctgagccaagtcgcctcccctctctgggctagagtttccttatccagacagtggggaaggcatgacacacctgggggaaattggcgatgtcacccgtgtacggtacgcagcccagagcagaccctcaataaacgtcagcttccttccttctgcggccagagccgaggcgggcgggggtgagaacatcaatcgtcagcgacagcctgggcacccgcggggccgtcccgcctgcagagggccactcgggggggtttccaggcttaaaatcagtccgtttcgtctcttggaaacagctccccaccaaccaagatttctttttctaacttctgctactaagtttttaaaaattccctttatgcacccaagagatatttattaaacaccaattacgtagcaggccatggctcatgggacccaccccccgtggcactcatggaggggggtgcaggttggaactatgcagtgtgctccggccacacatcctgctgggccccctaccctgccccaattcaatcctgccaataaatcctgtcttatttgttcatcctggagaattgaagggaggtcaagttgtttgtcaatgatttgtcagagaacctgttgaaatgtgaattaagaagctaagaaaatatttcttagcaacattttctttttcttttttttttttttcttttgagacagagtctcactctcgtcgcccaggctggaatgcagtggtgcgatctcggctctctgcaacctctgtctcccgggttcaagcgatttcctgcgtcagccccagagtagctggaattacaggcacacaccaccacgcctggctagtttttgtatttttagtagagctggggccaccctggcccggccccgtcttcctccccaaaggtcagactgcaggctgcagggctgtgctggaggagccagctctagctcacccatgcttttgcaacagggtcgggttggaagtcagcacaggtcagtcctgcggaaggttccttcgtgactcatctgtgaagtggggtggttgggagaggtagctgagagaatgcatgagagtcctcggtgcctgg

SEQ ID NO: 305 - protein, 536 aa, Homo sapiens
MPRGWAAPLLLLLLQGGWGCPDLVCYTDYLQTVICIMWNLHPSTLTLTWQDQYEELKDEATSCSLHRSAHNATHATYTCHMDVFHFMADDIFSVNITDQSGNYSQECGSFLLAESIKPAPPFNVTVTFSGQYNISWRSDYEDPAFYMLKGKLQYELQYRNRGDPWAVSPRRKLISVDSRSVSLLPLEFRKDSSYELQVRAGPMPGSSYQGTWSEWSDPVIFQTQSEELKEGWNPHLLLLLLLVIVFIPAFWSLKTHPLWRLWKKIWAVPSPERFFMPLYKGCSGDFKKWVGAPFTGSSLELGPWSPEVPSTLEVYSCHPPRSPAKRLQLTELQEPAELVESDGVPKPSFWPTAQNSGGSAYSEERDRPYGLVSIDTVTVLDAEGPCTWPCSCEDDGYPALDLDAGLEPSPGLEDPLLDAGTTVLSCGCVSAGSPGLGGPLGSLLDRLKPPLADGEDWAGGLPWGGRSPGGVSESEAGSPLAGLDMDTFDSGFVGSDCSSPVECDFTSPGDEGPPRSYLRQWVVIPPPLSSPGPQAS

SEQ ID NO: 306 - DNA, 3405 bp, Homo sapiens
gcaggcagaagcagcaggtaccccctccacatccctagggctctgtgatgtaggcagaggcccgtgggagtcagcatgccgcgtggctgggccgcccccttgctcctgctgctgctccagggaggctggggctgccccgacctcgtctgctacaccgattacctccagacggtcatctgcatcctggaaatgtggaacctccaccccagcacgctcacccttacctggcaagaccagtatgaagagctgaaggacgaggccacctcctgcagcctccacaggtcggcccacaatgccacgcatgccacctacacctgccacatggatgtattccacttcatggccgacgacattttcagtgtcaacatcacagaccagtctggcaactactcccaggagtgtggcagctttctcctggctgagagcatcaagccggctccccctttcaacgtgactgtgaccttctcaggacagtataatatctcctggcgctcagattacgaagaccctgccttctacatgctgaagggcaagcttcagtatgagctgcagtacaggaaccggggagacccctgggctgtgagtccgaggagaaagctgatctcagtggactcaagaagtgtctccctcctccccctggagttccgcaaagactcgagctatgagctgcaggtgcgggcagggcccatgcctggctcctcctaccaggggacctggagtgaatggagtgacccggtcatctttcagacccagtcagaggagttaaaggaaggctggaaccctcacctgctgcttctcctcctgcttgtcatagtcttcattcctgccttctggagcctgaagacccatccattgtggaggctatggaagaagatatgggccgtccccagccctgagcggttcttcatgcccctgtacaagggctgcagcggagacttcaagaaatgggtgggtgcacccttcactggctccagcctggagctgggaccctggagcccagaggtgccctccaccctggaggtgtacagctgccacccaccacggagcccggccaagaggctgcagctcacggagctacaagaaccagcagagctggtggagtctgacggtgtgcccaagcccagcttctggccgacagcccagaactcggggggctcagcttacagtgaggagagggatcggccatacggcctggtgtccattgacacagtgactgtgctagatgcagaggggccatgcacctggccctgcagctgtgaggatgacggctacccagccctggacctggatgctggcctggagcccagcccaggcctagaggacccactcttggatgcagggaccacagtcctgtcctgtggctgtgtctcagctggcagccctgggctaggagggcccctgggaagcctcctggacagactaaagccaccccttgcagatggggaggactgggctgggggactgccctggggtggccggtcacctggaggggtctcagagagtgaggcgggctcacccctggccggcctggatatggacacgtttgacagtggctttgtgggctctgactgcagcagccctgtggagtgtgacttcaccagccccggggacgaaggacccccccggagctacctccgccagtgggtggtcattcctccgccactttcgagccctggaccccaggccagctaatgaggctgactggatgtccagagctggccaggccactgggccctgagccagagacaaggtcacctgggctgtgatgtgaagacacctgcagcctttggtctcctggatgggcctttgagcctgatgtttacagtgtctgtgtgtgtgtgtgcatatgtgtgtgtgtgcatatgcatgtgtgtgtgtgtgtgtgtgtcttaggtgcgcagtggcatgtccacgtgtgtgtgtgattgcacgtgcctgtgggcctgggataatgcccatggtactccatgcattcacctgccctgtacatgtctggactcacggagctcacccatgtgcacaagtgtgcacagtaaacgtgtttgtggtcaacagatgacaacagccgtcctccctcctagggtcttgtgttgcaagttggtccacagcatctccggggctttgtgggatcagggcattgcctgtgactgaggcggaacccagccctccagcgtctgcctccaggagctgcaagaagtccatattgttccttatcacctgccaacaggaagcgaaaggggatggagtgagcccatggtgacctcgggaatggcaattttttgggcggcccatggacgaaggtctgaatcccgactctgataccttctggctgtgctacctgagccaagtcgcctcccctctctgggctagagtttccttatccagacagtggggaaggcatgacacacctgggggaaattggcgatgtcacccgtgtacggtacgcagcccagagcagaccctcaataaacgtcagcttccttccttctgcggccagagccgaggcgggcgggggtgagaacatcaatcgtcagcgacagcctgggcacccgcggggccgtcccgcctgcagagggccactcgggggggtttccaggcttaaaatcagtccgtttcgtctcttggaaacagctccccaccaaccaagatttctttttctaacttctgctactaagtttttaaaaattccctttatgcacccaagagatatttattaaacaccaattacgtagcaggccatggctcatgggacccaccccccgtggcactcatggaggggggtgcaggttggaactatgcagtgtgctccggccacacatcctgctgggccccctaccctgccccaattcaatcctgccaataaatcctgtcttatttgttcatcctggagaattgaagggaggtcaagttgtttgtcaatgatttgtcagagaacctgttgaaatgtgaattaagaagctaagaaaatatttcttagcaacattttctttttcttttttttttttttcttttgagacagagtctcactctcgtcgcccaggctggaatgcagtggtgcgatctcggctctctgcaacctctgtctcccgggttcaagcgatttcctgcgtcagccccagagtagctggaattacaggcacacaccaccacgcctggctagtttttgtatttttagtagagctggggccaccctggcccggccccgtcttcctccccaaaggtcagactgcaggctgcagggctgtgctggaggagccagctctagctcacccatgcttttgcaacagggtcgggttggaagtcagcacaggtcagtcctgcggaaggttccttcgtgactcatctgtgaagtggggtggttgggagaggtagctgagagaatgcatgagagtcctcggtgcctgg

SEQ ID NO: 307 - protein, 536 aa, Homo sapiens; identical to SEQ ID NO: 305

SEQ ID NO: 308 - DNA, 46730 bp, Mus musculus
  misc_feature (1)...(46730): n = A,T,C or G
gaccttcaatttaaagtagcatctgacaggagccaagcattcaaacatcctccagcaaagcatctcttgtgaagaaaacaaaactgctgagaaaaccctgagctgccctaaggcagggagctggagcctttggcctctctttggtgccttttcttattcacacattctttgaaaagaaaagagaaaggtgtgggtgtgcgggcaaaggatctgggaaggaacactggaatgaatcacttggggatgatttgagagcttcagcaagagcagaaagcccatttgttcatttagtggacatttactgggtgcctcctggttccaagctctgccctggggctggacatttaaaaacctgaggtaggcaggtctggtctgtgcaatcaaggagctcgtggaagggtagggaagagagggatgagactcataaatgagtgctttactgtgcgtaatgagtgccttaatggaaatccgagccaagggcagaaggagcccagggcagcaactccggaaatgggttgaaaacagcaggatctagtctgtgcagcttgggagtctgtctggagttctgccaggcttgctgtggctactacctttgtctgagacaaaggaatgaatgagggaaagtgtctaaagaaaagtcgtccaggatggggtgtctctgcaaagaaacattctacgaatcctgatgaattatgaagtccttgtctgcagcaaccttggtcctttccgtcagtttgactcatgcttaaaaggcagcaagtgaacaagaaatagtattagctgaatggaaggagggaggggaaggagggagaaaagaaagacagctacttatatcatcaaaagtggagccagtttgcacgttgagacaacacctggctgaaattctgtttcctggtgtagtgatcacgtgacttacgagccaacagatcccttggccccaagtcttcacctccaatacatgtggccttaggaagcccctgaacttctctgtacagcttgttatctgtgtagtgggatttccctctgctgtgagggttaaaaattattaagtgtgaaaagatcagcgtaatgcctcacttagagtcagtactgagggaaatattacctgaatgactgtcaggtttgatttaggtaggggggaggttgccaaatacttcatgtggaaattacacaggtattccaaaggaaggatggtttctctttaccgaataagggcaaattttgtaaattccttgcttctgaagatgagcacattttaaagaaatggttataactgggtgtggtgatacacacctgttattccaatctcttagaaggctgaggcaggagagtagttagtttgtggtctgcctgagtcaagttcaaggcaagtttgagacagtaagaccctgtcttgccaccaccaacaacaataacaaaaaaagaaaaagaaaagaaaagaaaagaagagaaagaaagaaagagaaaaagaaaaagaaagaaggcaaggttcattgtttttccatcctgagacagggtttctctgtgtagccctggtggatctggaactcaagttgtggatcaggctggcctcaggctggcctcgaactcacagagatccacttggtggtggaaggcataggtcatatacctaggcgaggaactggaagctcacagcatcgtgatggaactctccatctcctctctcaaggattgtgagagccgtggggagcgagcgacacatagcctgctccaggatcctcccgctgagtccaagccccagagatcctgatatgccacattcacagggctctatctggcaataggatccctgggatttttctagtcttgccagagggacccagccaagctcgaggcttataacatctccctatgagtgacctgatagcacttctttaggatggcaagtgagcatgcttccatggtatggccaccctggcacaacaggttgatgttggagtttcgggagaccagtagcaactcatcttcatctccaccacgcccccaaggctcgcttgtccctgcttctcttggttcagtatggcagccaacgctgtgtgcgggaggtgtgtcagccaggatgatttaagacgacagaaactttggagctaaagagctcctcttctgtgggaaggaagagggaactgaggagcctcaagtctctgggaaggaagcttggttttctggggactgaggcatggcgctggccttcataagaggtctgggggtcagagtaaagtggatctagagggaagaatttgatggcaaattggaagagaggtttttatttttcaatctttactcttttgagatagggtcttgctaagtagttctggctggcctggaactcaatctgtgacctaggctggccttgggatttacaggtatcctcctgcctcagcccctcaaggaccacaagcatgagcctgtgtctggctctttgacttgagatcttgagtagagaacatggtttcctaagctggactggaggctgagcctctgctaggtccttaaccttctgaccccatccccacctggcctaggatcccgccttcccgcctgagtagctgcagctatctgagagcgatctgtcagtttcaggggtcacccctgtccccctgactgggcaggcctatagtcacagacagcacctcctgaactcctgtagggagcacaggagtgacagtggcaatttcatgtttcaccctgtctgggcagggacaggctgagccctgctggttgcaccacagccctgtagagtggggggatcccctcccagggagtggccagctcaggtcctaacaggcccagtgggggcggcgctgtgtggtgggctgcttgccacagtaggcacgcccagggcttgggctgggcgggctggttccttctcttcaggagagttgcagcctcagcaccacgtatgcaggaggcagctgaacctgagggaggactaggaaggggcttgcttctccaagggcttctaagatgtcaaggccatggggttcctttcagatggagagtctataccagcctgggacatggggcgttcactctgcacagtgtgctgtctttataggtgctatcttgtcatgttccctaaccatgtcataaaggactatatatagtattactatcacaggagaagcagctaactatggtccacttaggacccgtatataatgggtagtgatgcattcttctctattgtatgctccgccactgaattctacctttttacggggcacatattctgggtagggagtggggagcacagcaaagggcctgtagggagaagctggtttgggaagaaatggggcagttgtcagaccccatggaaagctttctgagagagctgaagacagtgttgattctgaccctggatgggtgccctctactgcagagggtgctgcctttcccaaggaagtgcccagctctcaggcctggcaatcattggacgatttaaaagcacacacggactgtgtctgctgctgtgacttcctcatgtaaatgtactgctgctgcagcccaagttgctgcctggcccctggggaggagacatagcctcgtgcctaaccggggcagggtggggaaccgcagctgcaggttggcataagaagagggctcggggctacgaggggatggtggcagggggccagggcctaggcagctgggccacagccagttcacatctgagagaccttgctaggcagcctgccagtctgtacgcggtggtggnnnnnnnnnnnnnnnnnnnnnnnnnnnnnnnnnnnnnnnnnnnnnnnnnnnnnnnnnnnnnnnnnnnnnnnnnnnnnnnnnnnnnnnnnnnnnnnnnnnnnnnnnnnnnnnnnnnccccgcatggccacaaacaaagctacaactccagagtaactgtgggagtccagcgcctagctcccctgggtgggagtcagagggggcagacctggcaagagccctttggcaggtttcctgcatgcccaaggacatcttactgcgtgcacctgggcagaggctgaggggcgagtgtggactgtgataggctggctgtgaggcagcgagaggggaggctcaggcagatgtgttcgctctttttctggtttcagtctttcttgccataatttcctctttcttctcttgaggctttctactactgttctgtcagtgtgtgtttcttccacttggttcttcagtcctggtctgctcccctactccctcgttttttacctcccatgctaacaggtataaaatacaagcttctagcgggacacagtggcacaccctacattcccagcactgagaaggcggaggcagaagatctagagtacaaggccagtgtgggttatatagcaagttttaggccaccttggcctatgtaagtgagactatcaaaaaccaaagagcttaaataaagcaaaatgcatagatcttaagatcataaagctcagtacaggggcctggtgagatggctcagcggttaagagcgccaactgctcttccgaaggtcctgagttcaaatcccagcaaccacatggtgggtcacaaccatctgtaacaaaaatctgatgccctcttctggagtgtctgaagatagctacagtgtacacacattataaataaataaataaataaatcttaaaaaaaaagctcagtacatttgcaaacacttgaaaatccaacactacatcaagatatagaatctgtcatctctaaagtttctatatttgcctaggaggcatgtgcccactggactctgacatctctcaccacacagcaagtttgtctgggtgcctgatgctacacctcctcctcctccttctcctcttggtttttccagacagggtttctctgtgtagctctggctgtcttggatctctctctgtagaccagactggactccaactcagaaatccacctgcctctgcctcccaagtgctggcattaaaggtgtgcgccaccacttccaaacttatctgggcttctttataatatattcttatgaacattatatttctcatcctgcactagtgaaaaaagtgtgtgtgtgtttgtgtgtgtgtagattgtggggggaggcatagacagacagacagacaggatgggaggaaggaagaaggcctatgagtgcaggtagacagagggcggacttagcaattgacttagcaatttatggatgactttgtcttgtaggctgggcatggagagagtagtacttttttcttgttctgttttttggtactctttccaagctacccccctccgccccccagttctttgtaaacactgacatctggcagaaaaacacttgcctacatccaagcgtggcagaggggaacaggagacacatcgttggcttgggaccactcttttgcctaaaggaagtcaattcaaaggcagttctttgtcagtcacccttctgttctttccagtctgagagagcacatgaggaaaccacattagcacacgtacagaagacagtggagcccgacaggagcaaggctgccatgcacaggaattggagagtgtgtccccaggccaagtcgggacctttacgtagatagtgctgtgtggttcttactgggtgccttgctaggcatgggggagggggtcagaagacagaagacccggcgctcttctctctaaggggcttgctgcccagttggcataagatatactttcaaagcacatgagcaggatataattaagaaccatgagaggctgcatcagcccctgcctcctctcctgagggatgagcacagccgtcagacaagccctttgttgccaagacacaagagcagaccaatctcctgccactgccacgttaggagctactgatccccagattcaggctctgaataaatgctaattgagcaggtaagccatagatcaggcactgctctaaactagggtgcagagcggatgaaggaaatgttgtagttagcaaaaattgatttttgacaaagcttgtgtgtgcatgtgtatggatatgcatggatatgtgtgtgtacgtagatcttatgcatgtattcacaggcatgtgtgtgtatttgtatgtgtgtatggaggccagaaaacaactttgtatgtaactcctccgagccatccactttttttttttttttctttttttgagacagtctttcactggtctggaacttgccgagtaagttaggctggctagcagggatctgcaggcctctggattacaaatgtgttttgccatggttgcctttttctcttcctcctcctcctcctcctttttccttcccctcttcttcctcttgttcctttccccctcctcctctctctctgtctctgtctgtctgtctgtctgtctctctctctctctctctctctctcacacacacacacacacacacacacacacacacacacacacacacttacttctgagatcagactgacccaggctagttatcccatagaatgctcttcatattggcggtatctgctttcgtccttattattagacatgggttaaaccctttggtaggaacactgcagggactgataatgtgaagttctcagggcatcatatgggaggcaagcaaagattccatcatgctactcctatcatggctgaccacttgggttaggatgggagccaccagatctcattggcaggcatacattggcctttgggctagtgatcatctgtgggactggccgtcagacactgtttccccagtctttatgtccaactgtggtcttcgctaagtgttctttctagtccttctatttctacacttagcagcagcgtttgtacataaagacatttccttctcttcccttcccttctctttccctttctctctgagtcacactattgactaatgggttgtattttcatttgctgcattagaatccattacttatgctgtttgataaccaaatggccatccgcctggctcctctccacgcggccatcagactgtctcttcaggcatggcctcattaggctttgctttgctttcaggcccaacaaaatgagctctttaccttgtacttaaggagagcgctctgcttttatagaagagcggtgtgcagaaaccaagatctggaggctaaatctgcacacccattatttttatcagtaacttgattaaaggtctaaggaatacttagccaaatttacgatgactcaaaaaccaggaaaggaggtgccaaatgtatgataatagaatcaatattcaaaacaacctccgtgggatgaaatctgggccagaaccaatagatttaagagagataattttgaagtcttgtgttcagttgaaaaagttattgcataatttcaggtttggggcacttttcattagacagaaattggcatcagaagattgttttaggttgttagccaacacgagcctgtagtagtctgacccttgtcatcctcggtcacccagtcattccttcaaccaacgcttattgaagacgcctgccatgtgtacaggcaccattccagaggcttgggaggttgagcaggggaaagctgcacctagactttcattttatttatgtatgtatttatttaagttctgttttcggtttgttgttgtctgagacagagtttcacatagcctcgattggcctcaagcttgttatgtacctgaggctgccttggattcctgatcctacccgcccttcacctgccaagtgctagaattaaataccaccatttccagctgactttagaaatttattttcagccgggcagtggtggtacatgcttttagtcccagtacttggggggtgggggtgggggtcagaggaaggaggatttttgtgagttcaaggctagcctggtctacaggagttccaggacagtcaagactacacggagaaacctggtatcataaataaagacagccagacannnnnnnnnnnnnnnnnnnnnnnnnnnnnnnnnnnnnnnnnnnnnnnnnnnnnnnnnnnnnnnnnnnnnnnnnnnnnnnnnnnnnnnnnnnnnnnnnnnnnnnnnnnnnnnnnnnnnnnnnnnnnnnnnnnnnnnnnnnnnnnnnnnnnnnnnnnnnnnnnnnnnnnnnnnnnnnnnnnnnnnnnnnnnnnnnnnnnnnnnnnnnnnnnnnnnnnnnnnnnnnnnnnnnnnnnnnnnnnnnnnnnnnnnnnnnnnnnnnnnnnnnnnnnnnnnnnnnnnnnnnnnnnnnnnnnnnnnnnnnnnnnnnnnnnnnnnnnnnnnnnnnaagagggagtcagatctcgttatggatggttgtgagccaccatgtggttgctgggatttgaactcaggaccttcagaagagcagtcgggtgctcttacccactgagccatctcaccagccctcccagcatcttcataactggagtcaggaactccagttccagggagtctcaaaccctcacactgacagatacatgtaaaaaaaaatttttttttttagacaggatatctctgtgtagccttgctgtcctggaactggctctgtaaaactcaagagatcttcctgcttctgactcccaggttgatgggattaaaggcctgggctacaggcctgaccttgaaacagtatttaaagtgctatttatttcatgtgcattggtgttttgcctgcatatatattttatgttacacacacaaacacacaggtcagaggtcacagcttgtggagtagactctgtctactgtgtttgagaagagattaacaggaggaaaggaagcagcagttagagcagaaacagtacatttcagatgatgggttaaccagtgcaattggacatgtggcatatgagaaaagacacgagactgtagaaggatgtcagggtggtgacagtacaggagttgtggagcatggggaagtctggatgtaagaaagaagacctgagaccatccaagagcttgtctgctctgactgccacctgcctgtgggggtggggaggagagtagaaagatgtggctctggaactgcccacatgggcacacatgggcagcagcgagtgcagtgtagcttcgacaactgcagaaaagtctgggggaagtggtttcattgccacaagaacaatgaacacatatttttaagtttttaattttatccattcacctaggaaaagctgaaacgggtttccaaaaccttgatgtctttgttgatctccccctctttatttccctctattcctttgctgtggctccaccaaattgacttcagattggggtacctgcgggtggatacctctggcgtctcattccagccttagggaatcctttcctatgctcagccacgtgctggttgtgggggggaaggtctagcctctttggcagtgcagtccgtgaaatcctattatcccacttgaactgattctgcgccggccccgggcttcgcgtggacagaattctaagcatggacaaccgagcagagtatctagattctagaccatgcatagacctctcgcggaagtaagactggaaagctaccagtctccgtctcagagtctgcacagctcccagagcgggggtgggggtaggtagggggcatgtggggcagggttcccgggagccggaaggagggcgggtccgtgcggctttgcgagctcctcggtctccgggcttcaggtccccaggctctgctccgctccccctcccccccagtgccccaagtcgggtgactcgatccagcgcccctcgtacttcagcgcccaggaaggaggaaggggaaagagctgggcaaggaccagctaggaggcccgcctacccgtcgacttcctgctccgcgccctcctccctgcggcgagagcgcggggctttcacccgcagcactgggcagagggagcctacggtgcggcggcccacgtgaccaccttccctgccgcccacccccaggtccagaggcggaggccgagggaaggactccgggccgaaccgcggggcggggctccagcctgcgattccacttgagcaacctgagccggaggaggacgccgctgcctgctgcggtccgagctccacgcgccgcgatgggccgggcgagccgctccgctgtcctgcggcgcgcgctgctgctgctgctgctactgctgctgctgcggacgacgactacgcgggcgctcggcccccggatcagtgtgccgctgggtaagtgctatggggcgcggcagaaggaggggagcgcgggcaacgagatgcttggtggggtggccacgacaaaggagaggttgaggtccactaggaccaggaaagcagttgtggtcaaagcgaaagaggagggaaagctagggagctgagagcccttttcttccattttctatctggacttggagagggccgctttcttgctcggttgcagctgctcttgctcggagggagcacactcggcactaggggcctcaggtgccagccatcctgcctactcatttacttgtctttgatgctgaccagagtcagccttggagccaccaacggcacggggctgagggcactgctgctggccgtgctataaactctgggcttatgatattctcagtcagccacagcagagcctggagtttggcgggtgggtgccaggtctttcctccctgccggcccatctctgactgatcgacctggagaattcaccccctactccaaacacagggacttggaaactgacattgcgaagacccatctgtaccctgtctagaggggcctgagggtatcaccctggtgggccacattccttttttggtggtttacagctgcccctggctgcctgtgtttccaatcctccactcattctttacttcccttagtctgatcgcccctgaaccttttccagggaacctcaacgtttggaattctagggacttagcccagtaagtacttcctactgcccgcactccagcttcctcccctgcaaagtcgcctcaggcttagataccttgcaaagtcatcttgggaaattcataaaacttggtgcattcggagggcatcaggcacataggtgccaacagacaatgtttggccaaacccctctaaattgcaaactgtcactgtgagttagtgcataaattagaggttacagactaaaactctaccagacttcctactccatatttgcatccccacccctaaaagcatcccatttgcaaaaggatagaatcagctcttcagttaaggcccctaacaggatctcagtcccttatccaaaacattgttggtagctcaagttcaaatcctgtctcagccacttagttcccacatgaccttaagtaaacaacttctctgtgccttgatttcttcatctgtaaaatgggatattagcgccttgctcaaggcgcagctcattaccagttgcaaagtccttaggatagggcttggtacagaaacctctcagcgggtgtttgctgtcattcttgttatgttaaactcggaccactcctgcatggaactgggtggttcgctgtgggtggggatggttctagagttcactgctgctccttgggagttctgttcttgaagtgagaaatgactgaaatcggaacccaggactgatgctctgccactttaaaacacttacttagcttgtgtgtgggtgtaagggcacacgaaaacatgacgtacatgtggaggtcagtgaggtcagagggcagctggtgaaatcctccctcagccgtgtggatctcaggacctaagctcaggtcctcaggtttggtgtcaaaaatccctttccctgatgcgccacctccccatgaccccctcaccttgttgacccagggtggaggtatgagctaggtatggaacctgtcctgtgttaggtgtgttaggctctgagccatacataccccttgctgcttctgtcatcctgtgtttccctagagctctcagccctcccgaggctgcaaccctttaatgcagtccctcaggttgtgatgacccccaaccataaattacttttgttactgcttcatagttgtaaatttgctaatgggctgaggcccgcatgttgagagctgctgtcccagccgtaaggaaggggctgtgagatagagacacgtgcccctgtggatcccgcttacgcctggggaaggcaggactagcttttggggctacaccaaacacagtaggtcttttgccttagggagtgatgtgaagacttgataggggcgtagagaggcccttcttcctgggagagcatctgtcttgggttagctgtatagttccaggacctggccacctcccacaattccctgatcattcaaggctgccacaggtgggcagtgtgtgacttgtgcactgtacagaggtatttagctgaggggttgaaagggctggcaggccaggaacacaattttattgtgtttgcgggacggattctaggttctgcctggggggggggggggataggggggggatgctttttcagtcctccctaagctctgcagcgttgtagccatgcccagccacctcaccactgggtgtgcatccacacctgactgagctccccgccaccacagagctttaccttccagggcctccacagcacccttgagacctgcttctgcttcctttcctcccaactacaggaaggtcctgtggctggagtcccacatggggaatgccctggtgactgaactggctcgccctttgagtctgacctgagacagtttcctgtctcatccctgggggcttgttagatgttcctggcattgtacccatccttggcaggcccatggtgaccatgggtgcctggcccaaggcctttttagccttctgacacaggcaggcctatcagggattgcacagaactgagaccacaccccttttcccaccacctgaactgaattcccacccaagtctactctcaagaacctgagcttagggatagtggacttcatctgtgatctaaaaccaagtcccttgaagtgggaaggtccagtttattctgcatctaggggctcatagagaactctcattcctgctgatggttcttgggagcccttagcttggaggtgttcttgtgacttcacctaatggttaggagagggaaggaagacccgggacattttgggtgagagtcgggagcggccatgaggattcctaagccagctggaagtctgtgaaagtcatgcttcagagcagagcatgaaatttgggttcttttacaatggaaactccactccagggctgtaaagtggggtacgagcaggaatctggccttgaagaagcaaaacaaaactgctcccacagcctactgaagtctggtggaaccaccttatttgggcaattaaaagagttattaatgtctcccagccccagagacgtcctgctctggaaagtgtatgaaccagattggaattaaatctgtaggcctgcaaaacgcagtcaacaaaaccccattgaatgcagaaaacaaggcacttggcacgagccagctgcccgtctgagtcaaggatgcccgagtggcccctgtgctggccgcggttctggttccctcttgcctgctattgacctctgcctcacatgacctcggcccagcgtgagactctgtagttctgtctcgtatgtgggcctgttcatgacccttcagaggcacgtggatggtggagagcttcaagaatgggggctgagagccaatctgggaaagctggctcaccactctcatcaaaggacacatcaaatggcaagcagtggccttcttaagcctgtatccttgtccacagaaccagaagaatagcaggacccatctcccaggctcctgagaggattatggaaatagcatatgtaaagtgcttggcgtgagtcccgacacatgcagcctgcccatgcccatggaagggagcagcgtctgctgcatgctaccctgcccaagcccaccagccttcctgcaggaggtggatgctgagttggtggcgcctgctctgcccaggtcccagggtcgatgggaggtcattcccactgacttgcttaggtttgcccccatttcaagagcttatggttttgtccctttcagcgttattctgtgactcaggaccctccagtgcttgggactggattttgcctcatgcccccaccccccacctttgctgctgctctctgctctgtggaagtcattcagctggtgctgtgcctcctacatttgtagagtgtgggaggaacttgtgatgtactgcatagtgtagtcatcttctggttgatgggacctggttgagaggtctgcaaagtcaatgtcaccatacatatctccctttttagagcccgtggcccttgtcccatctctgtggttgcttaggctgggtcagggctcagaaacttctggtggagccctccctgcaccctaggggaaagaggatcaacagaactagtgccgtgctctgtgccttccctctcccgatcagaatctgggagagctctgtctcataagactacactgtatagccactttccccagttggccctccctgctctttacctctgacctccctgtcctggaagagtttgccacatcaggaaagaagccagcttcccctaggggacagtgtcatcgtgacacagggaacttgcttcttgccatcctgatgaccacaagcctttcctctgctactaccattgccttctgacgtctcctgggtcactgttagccctgttcctgtgtggtcatctctgccataggactgcccacaaccgttagggtcctagctggtgttccagccttgggaacctaggagatggctggcaaagtgaggagtatggctgaggaccacggaggagagggatttatccgcttcagggtgctccttcccaagcctgtgagtccgtctggaagcccttcatctagcctgggttaggagatgtgcttcagggagaggctatgataggtgtaatgggtgggagacagagccctcatttctcttttcttcagtagagtggcgaaggtggctaattggctacctttgggatttttttttttgccctcagggccagagtggaacccagaaacacagagcctcatatctgctaaggaaccactgtgcctcccctcactcactcaccttgtgtgagaggctccctaccgcagaagaggaagacaccagccactttcagttcccactgggctcggctctctccagcctgtgcagtggtattgtttcacccagtgtcgaaaaatgttgagccccagacaagccacctcattctgtcagggtcatggatcgctagagataagagactgtgcttgggccagtttgtgtcacgactcgggagcctcattctttcttagagaacggctacctctggcttcacctgccagttacacaaaggcaggcggctgagtggcccagctcagccctttagtgattgtcagctatgtgattccatctggtaaagaagtctgttgaggtcactcctcgctcgacagagcagacggagcaagggagccagctgaggccccgaaggcactgtcacattggatatcagtgggtttggccagggaataagggacacatatatcagaggcttgcacactagaggtgatggccaaagccagcgtgggggaatattttgcttggcttccaagtgacttcgaaattttaaattaatggctgatacataaaacctaggaaattttgtataaaaatccaaatttctggccctaggggactctggcaaggcagggcccgtcttcctaataataagcaactggggctaagcagccacctcctcctgaggacctcaagcctgcgtattctgtttattcataccaattctgtttcccttgcctgagtgcaccagagacccaggtgttacacagagaaagcctgtcccatgtgtgtgagaaggtgcaaaagatgggaggggaggacagtagggcaggaagaggagtgctgcgtgcaacactctgttagtcatcaaagccctcctgtaggccttccagcttagaggcaggtagccggccccaggttacacacgtgatcagtaatggcttttagtatttcctatccattgctctgcagctctgtggctggttttctgtttcctgcaccagttcaagctgccacatgtctctctgtggcctttgagtgctacaactgagtgagctgccagtgattggaggggtcagacacagtgtggagcaaaaacctttaggaaccccgtgctgacttttatcagtctagggcttctttctggatggtagcaccttagaatgagggactctgttttttactcaatcaacaaacattcataacatacctcttttgaagtcacctgacaaggtgatgcgtggtgatgtgtgcttggggtagcaataagatttagacaacgctcttctgtttggtgggaaaagtcagagctcatcaataagaaaaaatgtctcccgagcctgcgacagtgtaacctatgacaggccctcatgtggtgacaattttggaatttaggtttctttaaaaagcacagaaatataaaaatatgtttttgtcttagtcccaggtgtggggtacgcggctgcttcagactgtccacagcagctgactgtggtttgcctcgtgctgtgggaggggcatgggtttgccagctgcagattgattctgcgattgtgtgacatttgggattctggggcctttttagaggttgtataaatgctagggcccttcaggcatggtgggttgttggtcggttgttgtttgtggtttgttaagtagctgtgtgcaaagaagaaacaataagatatcagatatcttgactgtgaagatcaaacttgccccatggaacttaatgccccgaatcagcaggaagtagtctaacagtagcgttgccccctttcctgacccctaactttattctgggatctctttagtgttaggtggttgaaagggtggaacaaaaggggtggagaaggttggaagaaagaagaacccacagaatagccaaagagcagctatcccctcatgtggctggagattcaggaaggcctatagaggagctgatatgtatagcttagtcagggggaacagcagcacagagctggccgtgaccaaagcacccttgaacttcagttctgtgtcatcctctaaatgggtgcagagcctgcattgggtgatgctccaccatggcggtctttgtgaggtgatggtagtgacagatcttggagagcctttcagctgtagtacggggcactggggaggctagagtagcctgggtaggaggagcaggggcctcggtcaggaccatggttgtagactagtgaagtgaggcagattaggaaaattcaaaggaggggaagtcggcagaagttaacgataggttgcgtgtgcgtggctgaggagaggaaagtggcacatgcctgagctagagggtagaaaggcatgtgatcccaagacacagtggcacaaaggggcatgaaaggggcccacaggagggtgtccttggactaacccattatgcctgggggttcaccagactctgtggtaggtgtagacatgtgacccttcttaaagtgagaagatcaagagcaatacatgagagagaaaagccttgagaggccaaagagtggttaacaccgcagacaggagctgggcagcacaggttcatatcccactccgacctcatacccgaagtggagattaatcctacccctaccccacctggaggggctgttgggactttatctgcagagcccagggtgtgtgaggtagccgtgagatgacccttgagcctgtgagatggccctgacccctggaggataagtcatcaagtcatcgagtgagacatttcctgggcctaagagggctcacccaccacatgtggggctggttgaggccagttccctggaagggtgtgtgggaggtgaagaaaggcaaaagctctctggaggagtttctctagaaggtttctagaaggaacaaggtgttttctgaaagggagggcctccatgtgtggtgaaggtggacattgaagtcactgtattaagtggcccctgtttcttcagagaaaaactggggacttctgtgagaaagaaggtgggtaggaaggcagagagcacagaagagagttagagtggccagccatggaacagagggacacaggagctgaccatggtcctgtgtgggccctagaggggttgggcagaggtcaaggcctgaaggtgttagaacagcctgggtagcagaggtctcgtggcttaggggctctgacgggtcggccagttcacacagggacagttggaaaggaggcgcaccccatgagcacaaacgcttgcacactctctcgctctggttttgatctagtactgttattactgttggttttgtttgggggtcagggcctagagatccgtaaacctccaggaagttcttcctcagtctcccagatgctataaatgcttgcttttttttttgtggggtgagggatgggttgagacagtcttgtgtagaccatgctgggctcacacttgctttggagccaaggatgacctgggacttctgacccttcatgcttttacgttccatagcgctaggattactgactctaattccaagccgacaaatggattcttgaggacttcagcccaggggagactttggcacatagccccatggtagccaccacattgggactaaccctcttctatggtctctgtccaaaccttagtccagcgaatgtcgaccttggctccccacttatgtagcctggggccaaggtggctgcttcctgctcagccctgggtggcttgcagagaggaagtgcatataggtcagtttgctgctgactgtagcaagtgggttcaaggttctggtgacttggcatgatgtccctgaaacacccaggaggcctttcacacccctgcaaaccttgctctgactctgcagggaagctggggttttctggccttatcctgctggggcctgtggaggacaagaagctagggccaggtcagcgtctcactggtggctcaggagtcacagagcagagcaaagtggggtgggactcttgagtcagcactgcctagggtggggctgatccctattcctgttttaacccagaaagttccaagcttccggctgagtcacagggagagggagagtctctgtgaggctgggggctgaggaattcccgcatcacttcctgctaggttggggtgtgggatcctgcaggtgtctgccctagactgatagctctatcctactttcttgaaggatggagaactcatggggagcagaggcccttgggggagccccagctcctgggcagccactagcttaagatgcctggggccccctagagaggttcaatcctgattgggacagcagccagggtttctagttagggttaagccccgcatagggaaacagggagaatacctgagccgtattcacagccaggcgaccaggtggaacatgctctgtagcacaacagagaacacacacacacacctccacctctccagtcacctctgcacaaagagcaccaggcactcctgcacaagcctggacaggcctcaaggttccgtgcgcataggcacacagacacacagacatgggcaggctcgggcagggccctctacacagacgtctacacagccactttgttgaggtggcccccagacacgtgggagcttgggcggtcacagcacccaattcgtgcttgtagcacacggtctgtttctagctgatctgatcacaagacccttgtgggcacactcgggctcaggtggaatgggctgatgctgtaagctctcagaagggaggccgcaccccctgccctgccctctgcggcttgcccggctggattttcctgcagggcttttggattttgtttttgagctactcgagtgttgatcgtgtgccaggcaccatgccagcgcaggggaaacgtgtgtaaggttgttttgagtaaagctctcagtaagtgtgggttattatgtacattattatttacatacgtaatctcgtttcttctcataacaactctatgaggcagagggctattattgtccccattttgcagataaggaaagtggggctctgagaggttaagtggcttgtccttatgagtggcagaggctgggtttgaaccaggtctttgactcctgtatatgttctcagtctgtcctgtgagataaccagtggggaatagtgaggtccacagccgggttcatcagcagcgcaccatgactcttaagtttgaggcccagggtagaagggaggcgggctgagggcagggatggagggcggtcccagcatgagagggcatgctgtgaagggactgtgctcagttcaaggcatagtccacttcccttcccttggtcattctgttcggtgtgtttccagcagatatggagagtcctgagccgctggcccctgggcttcccctccagcctggcttgactttgtctgagggaccctgggcagcttgccatccacccaggctgaagtggagggggtgttgagctgccacctgggacttgtgcttatctcggactcttggcatttctgtttctggacagaacccaagggtggcttcccgcttagagctgtaggtcccacccaggtggaaatgccctccggtgcaggcagataagctctggcaaaccaaaggcagcctgtgcttccagaaaaccttgaggggtgcaagagataaaggggtgcaggagctgtgtgtcttgatctcccagagtcttcgtgagcctcactttttgtcttatccctgtgatacacacaggaagccacagtgaattcagtgggtgtcatacagaagggcctcctggagcttctcagagtgtagtccttgggctacctcctcctaagtcactgggagctggtcaagaggctcagaccagcagtttcagaatctcttgggagggcctggagtccgggtgatgtttagggaggttggcattggtgctggaactttccttggccccccaatttatcgaagtactaagggttggaagtctctggagctgcaggagttgagtttgagaaaaggctcttggtggtttaaagagaggtttcaactgcctctggcctcaggcaggaccgttccttaaagttctagcgcagccctgtgtgtaactctgggttttaggagtttgtcaagacttcagccacagagctatacaaatgtcctcaaacttctgcaccgcatccctccccaggagagcttctggggcgcagcggtgggggccctgttgtccagtgactggagctgctctctacctcatgtgtctcagcaggcttactagggaagccccacctgagagctgcttcagcaccctgtgctgtgtggtaaaaaaaagctgagcttccgtcaaagggctagtgtggtttcctgttcttgaacagtgtgagaaccaagttttttcatttcccctttctccgtggctaccaggagtcttggtactaaatttgcaacccaccccaatagctatgtaaagatcctgtgacctgcttgtgtgaccgctcttttctctctggtttagatgtcttcttcagattggtttttctctgcctgtgattttaatgcttctatctcaacactttcttgtctttgtgtttccttacctcttcctggaaccaggctgagggtatgtaaagacacgggacacgcagacacacatgaagtcatcctcacattgcttggctggcatgctgtcttcatggcttcccagctctgtgagtgtgtttgtttgcatggtcctgagccactggtcggttgggacatgcctgaggctggtcaggggctgccttctgcttggtgggtttttgtttctttagtttgttttggttgttttaaatttctctctacgcccatcagttattcagagtgtgaacacactgatgggccagtgggcgttgattgtttctttttccctcttaaatttacatctttttcatgacgtaagtttaagttgcttactgtaaaatctcaaaataatccctttaagaaagaggagaaatgctcatgtcctcctcggggtcgctgcagcgggtctgggtcgtttccccacaaagtgaaataatctgcccagaccttctgcaaccttcacttttgcttagtgataaataattattatctcttaataattacatcttctgcaacaatgagtaggtcctaaaattttctcattgtactgtgtgtgtgtggggtatgtatgtatgtatgtatgtatgaatgtatgtatgtataaatgcatgaatgctgaccagatggctcagtgggcaaaggcactgttgttgccaagcctgataatctgaattcaatccctaggactcctgcggtagaagagagcaccgattcccagaagttgccctctgatctccacacactcacacactcttttaaatgttaagcaggaaaaactttgctgtaagaactgacattgtcagccattgcattctgtgccctgttctctgggtcactgagcgttcccacctgccagtgttcctcttgatgctgtcatgagagcctcacaacatgagatgctcacaccaccttttctgtcttgtctcttgcctctccacttgctgcagggacatatgaggctctttgtccccctcacccgtccctacatgctctgtgctttccctcctttgccacttaaaataataccctgcctgggcatgctaatgcatgcttgtcacccagcacccaagaggctgaggcaggagaatcatgattttgagactagtctgggctatgtaacagagctgtctccaaaaaaaaaaaaaaaaagcgaactccgtttgggctagggttatatacttcacagtggcctaggctgggtgtcagctacaatcaaattagcagtacacttttttttttttaattagcaatacacttacaataccctttaacattttacttccaatgtctaatgtaatccttacttgtgtgtatctgacatacaggcatgtgtgctgttggggaccaaacccaggcccttacatgttaggcaagcacgtactgtgccacaccctgagccccgttagcctagtacagcgtagtgtgacccacttagctcccaggagggacagcagagtctcattcctaccccatccacccccagcactccccccccccccccagcatgcgggctgtctgtggcacagtcaggtattgaggaccaggccaatgtttagtgacactgtctccctgagagctgggggctctggctggaggcaggatcaggggagggagagggccgcctttgcatgccttttctttggatcagatgctgggcgaaggaggatgttaaatgtgtcagcctttcttctcttcactacagctgtttgtatgtgtgcatgcatactgccataacactcacgaggggtagggtgacagcttgtgggaatcactctcttctaccatgcggatcctgggtattgaactcaggtggtcaggcttggtggccaacacctttacccactgggctacctgcctgtccttttgtaattgttacccatgactttacattttaatttgcttcatattttttggccctttctctacctcttaaaactgtgtctcacttaagtaatcccagattgggctgaaacttctaattcctctgcctcatccttccatgtgctgggattgcaggcgtgtaccatcacacatagcaagactatatatctcttatacaactatatctgctattttctggagtttctaatctatgttgtttctgcacgctgggttatatcccattgaatggactcatagtctgctctcccccaccgtgggctctcaggtatagaatttttttttaagatttatttatttttattatgtatatgagcaaactgtagctgtcttcagacacaccagaagagggcatcagatcccattacagatggttgtgagccaccatgtggctgctgggaattgaactcaggacctctggaagagtagtcagtgctcttaaccactgagccatctctccagcccagtttctactttttcactcctgtgaatggagctgtaattaatttccttttccatgaacttcagtgcgtttcttttttatgtctgagtgtcaggagtgatgctctttttaataaccaacctattgccccaggttcatgccactaactgtcctgcagatctcccttagactagatgcagttatcctaaaacgaatggaaaaggccattctcaagcatgctgacttctctccccaggctctgaagaaaggctgattagaaaatttgaagctgaaaacatctccaactacacggcccttctgctgagccaggatggcaagacgctgtatgtgggggcccgagaggccctctttgcacttaacagcaacctcagcttcttgccaggcggggagtaccaagaggtgagagacatctgaggatggctaggggtgtgtgtttgtgtgtgtgtgtgtctgtgtgtgtgtctgtggtgtgtgtggtgtgtatgtcagggagaggtgtgtgtgtgtgtgtgtgtagtgtgtgtcaaggagaggtatgtgtgagtctgtgtgtgtgtgtgtgtgtgtgtgtgtgtatgtgtgtgtgtgtgtgtttgggaagctggcctgctggtcaggatgctctggacgggacaggacaggagtgtggctctgtacaccctctgtgcccttgcacacctatttccctcctccttccacagctgctgtggagtgcagatgctgacaggaagcagcagtgcagcttcaagggcaaggacccaaaggtgagactgagggatctgggcagaacactgagcagatatggctgttatgggaaggacacagtctggacatcgccagcactgggcttcagccccagccccagccccagccccagccctgtcctctatgtgatcctggataaatagattcatctggtcaccccttggttttctcacctgtaagatgggaatagtatgcctatatccctggataaaccagtgcatccagggctcctgtcccattagcgttagcaccaacatgaacctggtgaggtggtgacagtgtctgtaaagggtctctagtggacagataagtctggcagattctagtttgatttcagccaagacattagatggtatccagcccagtccagagttctcttgtaggacttgctgccattctcagaggcctccccatccatacacgctttaatctggaacagtcagcaagtacttgttggcagtgtggggtgaacacggtgcctctggcaagctagacaagtgctctggccgtgagacgcgcctcagcccctcttcagcacttggtccttgctgttagctactagagacattatgaaaaagtaaaaccatgctgtaatcccagaacgtgggcaggagggttaggagttcggggccaccctggactacatagaagattgatggactggactccatgacatcatttcaaaaagctaaaaaatgaaagaaaaaccaatgaaaaatcagtttataaggtggtcatgaaaaaaaaaaagagaaagaaagacagacagacagacagacagacaataccagggctggagagatggttcagcaggtatgaatatgggctgctcttctagaggatcagcctgtttcccagtacccacatggcagatcatgaccttctgtagctccagtccccagggacccgataccctctctggcctccatgggcacctggcacaaaagaggtgcacacatcaatgcaggcaaaacactcatacacataaaataaacaagaatgaaagcagctgggtggtggtgccacacacctttaatctcagtgctctagaggcagaggcaggttctctgtgagttcaaggccagcctggtgtacggagtgaattccaggacagcaaaaactacacagaaaaacactgtctttaaaagaccaaaaaagacagacagacagacatttatatagtgcaaagactatttagaggaaggtaaggaactggaccgtgacatacccagacactaagcaggactttgggtttcactctgagtgaatgaatcgttttggaaaccagtagaaagcttagcagagaagcggcatggccgtgtggttttgtactgttttgtggaacttccgattaatcccagggtctcacgagttagacaagtgctaaaccactgagccacatccctgaccctctgcttctgaggcaggttctctctgtcacctagactggccttttcacccagactggactggaacttgggatcctcttcattcagcccccccccgagtagctggaaatagagacgtgccaccaggcctgtcttgcctgtgttctaaaaggctgtccttgagccaggcatgcttgtgtctccttgtaattctagtacttgtaaggcagaggattattcattccaggtgagcctgggctgtgtggtgagactgtcataaataaaaataaacaaatgggccccgttgtgttgatgataagtgtcctctctggaattgaacacaagggagaccattgtggctcaggcagtgacagtgccttagtcagggcaccatccaaaaaggggtgagaaatgatcagattctgggtttttgttcattgaaggtttagcatccaggaaggtgtggcatttgagagacagccaggccacggcctgccactggaaagatggaaaaacttcagtgggtcttggggtgttggtggcaccaatttggcagttcctatcagacaccttgtagaggtggagtttgtgccaggagttcagggctgagcaattcctcctgctttaccgcctgtctcccccctgggttagagaagactctcaagaggattaagacactctgaaaggtgggattaccccctctagggtgcctttcacctcagagaaggagtattagccaatctggaagctaactgagccccagtgcagaccctgcttaagctctgccagccagctcccggcccagagctccaggtttcttttgttctgccttaggtctggggaggaggcctcagccctgccccctagtggcatatgtggacctgacatactctccttccccacagcgtgactgtcaaaactacatcaagatcctcctgccactcaacagcagccacctgctcacctgtggcacggccgccttcagccccctgtgtgcttacattgtaagttccctcctctaccctggggcttggctgcctggggcacagcctttctgccagaggaactcttccctagccctgattcctggtgaaggaggaccctgggggcaggcttctaggtagcagtaggcccttgagacccgtgagcccatcatcctggctgcttcccaggtcctactaggtctccctgccggggcagggaggggtgcatgcagccaccttgcctagagagcctgactgacttccaatttgctgcccactggtttctttcccttgctgtgcttggtgccccaggtcatcttgtgcacccttcagcgtatgcccgccctgtgttcctaccccatcccctaacatgctctagcagagggtggcattaatgctgttgcggaacacggggcttggagtcagaaatttctgggtttgcattgcattgctctccctggctccaggactattttccacgctacatctcttccctgttcgctggggaatagtgcccactgcacacactccttcgcgtagaccctggggtaaggagacgtactttagaacctgtgcacttccttgttccgtgtcttggtcctgagctacttgtctactcctccacagcacatagcgagctttactttagcccaagatgaggccggcaatgtcattctggaggatggcaagggtcgttgtccctttgaccccaacttcaagtccacggctctggtggttggtaagtggtgtcacaggctgggtgcttttgtgctccgtggaagatacccagggcaggaggaccgaatctggggtgtgtctgggctctgggcagtgtgggtcccagaggtaaggtggtgtccccatgctgtgctggttcccagagggtatcgagtgaccctgggctgccctcttccaagtccctgcttccgtctaggcaggatggatggcgctgcggtcactctgggccctgagcagggcacagggactgggccaaaggagccattcccatgggaacattctcttggcagatggtgagctgtacactggaacagtcagtagcttccagggaaacgacccagccatttcccggagccagagttcccgccccaccaagactgagagctccctcaactggctacaaggtggagttctgccttggcccactgagcagttgtctaacccttgggaggggatgctgtccccgaggttcctggcctgactgtgtctcctcccctggcctctgcagaccctgcctttgtggcctcggcctacgtccccgagagcctgggcagccccataggtgatgatgataagatctacttcttcttcagcgagacgggccaggagtttgagttctttgagaacaccatcgtgtcccgagttgcccgagtctgtaaggtgagtgggagggcgcagggtcatccacccaaggtgcacccacatctgtcaccttccagaaccagtccccagggagttgcagcccaaaaccagtctgtggctcctcttccttctcatccttgccttgaatctggagtgtctgggctctggacagtgtgtcccggggctgagctggcgtctccatgctacactgctgtcctcttttgttttttgtttttgtttggtttttcaagacagagtttctctgtgtagccccggctgtcctggaacttactctgtagaccaggctggcctcaagctcagagatctgccgcctctgcctcctgagtgctaggagtaaaggtgtgcaccagcactgcctggcttcttttgtttttgtttttgtttttgagacaaagtttcactatatagttttggccatcatgggactcactctatagaccaggctggcctcaaactcacaaagatccgtttgcctctgcttcccaagtgctgggattaaaggagggtaccaacactcctggttgtcctctcttcttttaattgagaaaatctcacattgaaggtaggtgtgaaggcgcatactccaaatcctgacactcagggagccggggagtggaggtctcaagtttaaggccatcctggataacttagcaaggtcctgtctttttttttttttttcattttttccttttggtcctgtctttttgtttgtttcttttccaagacagggtttttctttgtaatcctggctgtcctggaactttctctgtagaccaggctggcctcagattcagagatccacctgcctcagcccacagattctatcttaaaattttaaataggtattcctctcttagggtcttgagttcagctgccttcaaacatcctgtgtcactcaggctaaccttgaacttttggtgtgctatcccacttagtttatatattgctggggatcaagcccagggttataaacataagaattataagctacttggaaaagaagtccttggctttctcttaaactggaaacccaggaaagtgtacaaagaagtgacctagagtgaacagccaacggcatcactgtgtaagagcccagattctcaagtttgaacttccaggttccaacttagctgttaaatggcagtgataacatcactagctgttgcatgaattaaattctgccgtgtaaagctcttagggcccctgctatcacaagaagaagccattgttaaagtgttctttgctgatctgttcaaactaatgtatttgtattaactcagttacaaacctgagacctgagttgtgctatttctccctgtttgctcagtaatccgtcaatcatggacaccttttcctattatttattcatttatgtgttcattgtgttgaagccctacttcactccctccctggctgactgcaaactcttagacttgagcaatcctcctgtctcatcctcctgagtaaactcaagcttcaggtttctgacatggccagtgatgctagcatgccagatagcactggccatcgagcgctctcctggcccttccctatttggatggtttcccctggtccttctttgctcgttgtccacagtagggaacacactttcctgatgaaaacatactcaattttaggtgcacatctgtcctggtgctctctctcattcttcattcctgtgtgactcagctactgctgaggagggctggcaaggagacactgtgcctccgagaatggccctcagcttgtgactaagcccgtgtcccctcttctcctacagggcgatgagggtggagagcgggtgttgcagcaacgctggacctcctttctcaaggctcagctcctgtgctcccggcctgatgatggctttccctttaacgtgctacaagatgtcttcaccctgaaccccaaccctcaggattggcgcaagacccttttctatggggtctttacctcccagtggtgagatgctaggatttagctggggacaggagggtaaagagtggctagagcccgctgatggcatctcgagcctcacttctcaactctgagcacagagttaatttggctgtttcctttgcaggcacagagggaccacagaaggctctgccatctgcgtcttcaccatgaatgatgtgcagaaggcctttgacggcctgtacaagaaagtaaacagagagacacagcagtggtataccgagacccaccaggtgcccacaccgcggccgggagcggtaggtatcagtagtgttgtgctcagagtggcttctgggcaggcttggtccctggaccatgctgagagcaaggttgtatggtttcagacaaaccatgaagcttctgtgaatctgatttctcttctttgaagtagggcgtaataagccctggcttcctatcttaccaaagaagatgtcccatgaatgacagagcaccttcagtcccgcctcgtcagcttggcctccgtgcagtggtgtagattgtttttagttgtctgtctcaaaggcagcaggctggtgtaatctgggttgtttgaattcccagtcctcccaagtcctgggagtacaagaagacgccactgtaccgtgctttgcacaatgctgcacagtactgtcattatccctttattctgtccacccgactaagccttgtacacagagaaaccctggggcagagagaagcaggacctgggtaggtgtgggaattgattatggctgcactgagattggccctgaaaacttcccggcagccctagggtaagatgcacgggtaaggccccaggcaaaatgaaaagtcacactttgagacctgtgtgcaaacttggtgaggatcaataggccagaggccagcaggaaaccccggtcttgctttcttcacacgtcagatttgcctttggaccagcacagtgcagaaaggcagatgttccatgatttctggagcatagttaatgtggcaggggccgctactgtcccaggaggcatgctccacgctgattcctgtccctcctgtttctgccttcttcagtgcattaccaacagtgcccgggaacggaagatcaactcgtccctgcagctcccagaccgagtgctgaacttcctcaaggatcacttcttgatggatgggcaggtccgcagtcgcctgctgctgctgcagcccagagcccgctaccagcgtgtggctgtgcaccgtgtgcctggcctgcacagcacttatgatgtcctatttctgggcactggtgagtgtctgcagccctgcagaattgagttaaggagggcaatacatgcatggctggtagatcgtgggcggtgggctccaccacggcctgagtcgtgaccatgcttgcaggtgatggccgcctgcacaaagcagtgaccctgagctccagagtccacatcattgaggagctgcagatcttccctcaaggacagcctgtgcagaacctgctcttggacagccatggggtgagtgggccatggagtgaatttgaccactttgactgtcaacaagccagcttttctgtcccttgccaaagcaagatggaaagttacagagccctggcttctgaccataaaaaggatatgtggcagaacttgtcaggggtgccctgggatgactagtgagcatgtgaggctagtatgacagtgtcccggtgcctgtgtctccctctcactcttcatgtttggctgtgtagggactgttgtatgcctcctcccattccggggtggtgcaagtgcccgtagccaactgcagcctgtacccaacctgtggagactgcctcctggctcgagacccctactgcgcctggactggctctgcctgcaggctcgctagcctctaccagcctgatctggcctccaggtgagaactcccaaagacccagtgactcctcctcatctctgagcactgcatcttctctgggacccctgcacatggttatttctcagctctctgtggccatataatctatatggaccagatagacagggtttgccagaataagaaacatctagtaaagaagatgtggattgccacatgcacatagcttattgtaagtaggctgttcggtaagcctgttagaccattaaaaagtagagtaacattagaattagagatgtctattgagaaaacagagatgtgctatttggcacagtgatgcacagctttaatcctagcatgcaggaagcagaagcaggaagatctttgtgaatttaagaccagccaggaccacataatgagaccccttctccatttacatgaaaataggaatgagtcagctgaagtggggtttgtctgtaatccagtgcctggttttattgttgttctgttgtttgtttttggttttattgaggcagggtctcatgtagcctaggtgtggcctggaactcaggatatagtggtggatgcttagaagaagatggggtggccaggacctgctggtgcatgcgtataatcctactgttcagaaggtggaggcaggagggtcagaagttcaaggacatcctctgcaacaaagagtttcaaggccagcaggagttacaggagactttgtctcacaaaaatggatggtgctggagacgtggctcagcagttaagagcacggactgctctcatagaggacccaggtttcattcctaagctcccatatcaggcagtttacaaccaactgcttagaactggcttcctgcatacacctggtacaggaaattcacctaggtataggcagatgcacatacgtaaaaggaatacgtaaatatttaaaaaaaaaaaaaaaaaagacgagaagagggatgttctccaagtgaagctcttcagccctatctgtggactggattttaacatggctttgtatttccctaaaatgggtcaaacgaatgatctcattgttttattacaaatgggatctctcatttgtagttttcttttgtttatatcaaaaggacacaaattactgcacgcttaaagcacagaagtcatacactcccttagccgtatccttgtcttataggtggtatggctggtgtctatctttaaactttttcaggaacttccatatttggggatgattttgtgtgtgtggcctgaagtcccgttactaggggggtggaggcaggacgatctgtagttcagagttatccttgactacataaaaagtttagggctagcctaggctatataactaagacccagtttgggctagatgctctggcaaatgcctttaatcccagggttcagcaggcagaggcagatagatggatctctgtgagttttgaggccagcctggtttacacattcattgagttgcaagatagtcagggctgtgcaggaaaaaaaaaacaaacaaacaaacaaacaaaaaatccctgtttcaacctccctttcctcccccaactcttgcacacacacacacacacacacacacacacacacacacacacacacacacacacacacccagtaaaacaaaacaacagcagcagaaaccctgataaactcctggaagcatggatgtaaggtctcccttggctgattcatagcagattctgggcaacttctgtagtgcttgtattctttatgcttggttgagttttattttctccttttttgagacagggtctcactatagccctggctagccaggaattcactatgtagaccaggctggcctcaaactcacagaaatctgtctcagcttccccaagtgctggcattaaagatgtgtactacactgcctggctgagctttctaacttataagtgcatgaaaattcaccttttctagttacacacctgtaaccccaaaactagagagtctaaagtaaaagagtttgcagttggagggagggtagcctgggctaccttgcctatcctagccaaaaaaaaaaaaaaaaaaagaataaaaggaaagcctggcttgctttccttcctccttccttccttccttcctccttccttctttacttccttccttccttcctccttcctctttcttcccttcctttccctctctttctctccctccctccctccctcttccttccttccttccttccttccttccttccttccttcctttcttcctctctctctctctctctctctctctctctctctttctttctctctttctttctttctttctttctttctttcgacagggtcctgctctgtagctaggactgttgtgcacctcatggccatttcttgggtttttaattgccttcttttgtgggagggtagtatttcagacagggtctcatgtagcctagactggcctccagttcactgtgttgtgaagataactttggatttctgtacctcctgtgactacctcccaagtgctaggcacattctgcttttatagcaaaagggggttgtttgtgactttatttgtggtaatgtgtagacggggtctgaggagacggctcagaccgtggagtacttgcctcaaaagcgtgacaatctaagtttgattctcagaacacacataaaaatgccgagcatgatggtggcaagaagtacccctgtagttccctgcccatctgatctttcctagttgttaaactccaagctaatgagacgctgtgtctcaaaggaggtggatggtgttcataaggatgacaccaaggctgtcttctaaacacacacacctgtaattatgactagaaatacccagtcagccccatggtggtggggactctgctcaggcaagtctcctgcacctgctttgggcctggtgggcttacaccagcagtggagggaaaaaggaacactggccaatgggattctacccaagactcttttatacccaggccatggacccaggacattgagggtgccagtgtcaaggaactctgcaagaattcctcatacaaggcccggtttcttgtgccaggtaagatgccctgggaaaggtgagccatatttgcttggaaaacacctctaggtatttttaggtacaaatttattcctctagccctacaaagaagagtccagatcatgagtcacttagtcccaaccatcgcccaagttaccattggtcctagttagagtttctgtggctgggaagagacaccatgatcacagctcttataaaggaaaatgtttaattgaggttagcttacagttcagaggtcagtccattattgtcatagcaggaagcatggtggcattgcaggcagacatggtgctggagaggtagtgagagttctaaatctggatcagtggacagcagggagagagagtgtcactgaacctggcttgggcatctgaaacctcaaggcccagccccagtgacacacttctttcagcaaggccacacgtcccaatagtgtaattaattgcctttgagcctatggggccattttcattcaaactaccacactatcatagcaccagattgaggagggtgggcctaagtctggagctgctctggggaatgacctcttctaccccatgcctattctgcccacaggtaagccatgtaaacaagtccagatccaaccaaacacagtgaacaccctggcctgcccactcctctcaaacctggccactcggctctgggtgcacaatggagccccagtcaatgcctctgcctcctgccgcgtgttacccaccggggacctgctgctggtgggcagccagcagggtttgggggtgttccagtgttggtcgatagaagaaggattccagcagcttgtggccagctactgcccagaggtgatggaggagggggtaatggaccaaaagaaccagcgtgatggtaccccagtcattatcaacacatcacgagtgagtgcaccggctggtggcagggccagctggggtgcggacaagtcctactggaatgaattcctggtgatgtgtactctgtttgtgtttgctatggtgcttttgtttctgttctttctctaccgacatcgggatggcatgaaactcttcctaaagcagggcgaatgtgccagtgtgcaccccaagactcgccctatagtgctaccacctgagacccgaccgctgaatggtgtcggccctcctagcaccccacttgaccaccgaggctaccaggctctgtcggatagctccccagggcccagagtcttcactgaatcagagaagaggccactgagcatccaggacagctttgtagaggtgtctcccgtgtgtccccggccccgagttcgactgggctctgagatccgagactctgtggtatgagagctgactttagatgtggtcaccctgacctcaggggttgtgagtgttcagtggaggtcagctacctctgcttctcacagaacacagccacggtaccctgactggagggcagctggtaccacaggcccaacagcccagccagctgcttccagtgtctggccgagaactgggctgcctccaggggccagagggtccttgtctgggtggcagaactctgctacttaactgagccctttgtttaaaactgcaaatgtgaagccagagaggaaggagaaacagacaaggaagactacaacatagccactccagttcagcctgctgggctcttggggacttctccaaagtggctttgtgagcaagccgaagttgagaatccctccccgactggactattctaccttccgccttactctgctgctgaggctaccctttctcactgcagaatcagggccctgctccagcttcagccaaccgaggacatatctgtgaccgctgacaccctaccacctcagggaccagagggctaggctgattctgcagccctcctcaccagaccctgggctcagtcccagttcccggacttctccagcctgtatcaggctgtggcctcaaaagcaagggagtgacccccaaggggggttgtgacagaagacttgcctactgtccttttcccagtcagagaactatgtccctacccatcgacgtcttttttttttttttttttttttttttttgggtttttcgagacaggctttctctgtgtagccctggctgtcctggaactcactttgtagaccaggctggtctcgaacttagaaatccgcctgactgcctcccaagtgctgggattaaaggcgtgtgccaccactgcccggccccacccatcttctaattcctacacagactcctggatcctcgttccttgtcctagctcaccgtgcccgtcactctaagggatgctgacactgcccatcacaaggaccctgaatttacatgggttttatatttttttttaataagatgcactttactttcttttttaaataaaatccgacaaattatagttatttgtggcccacattcctgaagggctttgctttgtgtgtatgtgatatgaatatatgtatatgcggagaccagaggctctcctttgctttgtgtgtatgtgataggaatatatgtatatgcggagaccagaggctctcctttgctttgtgtttatgtgataggaatacatgtatatgcggagaccagaggctctcctttgctttgtgtgtatgtgataggaatatatgtatatgcggagaccagaggctctccttaggtatgtgtcatccgtaggaactgcatttgccttattagtcggggtctcattagctgcaagctcaccattaggctagagtggctggctagtgagtccgggcagggatcctcctgtctctgcttccccagctcatggactgagggcctcatcttgtgaggcagacacttgactaagtgagctatctccccagcctggcactgctttggggttttatcttcctgggggtccctttctctaaagtctaactgatgttacctggcagagtgtggtcttagcatagtgaattcctttcatctgcacccagtttagaggacagggcaggactttttgttactctagtgttttaagttttcagatgatatgggaaaactgacttttctttggtgaaccattcagtaagttctcacacatatggaaatgaacttgaatgtctccaaagtggggatgatcagaggcgcctacatgtctagtcctgctgctaccatcatacaaggaagtcaaacatttctaaacctttattaccaattagtaaacacagtgatgacaacagcagtgacaagggggagggtcctcccctgccagggggccagactctgcagcgccctctccaggctgggccggcactggccctgacaccgcaggcataaccttggccacatctcagcagtggccaggtcttggacaggatgttggtacttagaagacatcacaggacaatcttaaaggagctgcaggagggaagagtgagttaggtttggctttttggtttggtgctggggatcaaacccagggcctaacacatgttaaacatgtacactctaccactgcgctataccccttgggtttcctgatagaagggggtggtacagccctgactaaccatacccacttctctcctatgacttttttgtccctctgaaacaagttctggctggcatggaattcacctagctagccttgcacaggcaccaagcctgcctttgccttctgtgtgctgggattatagacctgtaccaccacagccaaaggttcctgtttgaggagctggacatgtagctcagtagagtacttgcataacaggtttgaaactgttcaattcttggtaccacaaaactagacatcctagcactcaggaggtagaggaaggaaaaccagaagttcaaaaatccaggctgtgtgtgctgatgcacaactttaatatcagtctcaaaaaaaacaaaaaatagagtgggctgggtcccctgtgtcctctgaaagaccatcctgaatcatgcccttgataccatcccagagtagatgggtactcagaatgcaggagcccctgtcacacctggcaaagtctggtgagcgcgagatgacatgctggaactcggaaagattgatggtcccatccctgtcaatgtctgactcttccaggatctagggaagagagggctttatgcgtcagctccaacccttcccacccgacaccccaacctagccagaagctgcagctcacattgtcaatcagctgcttcatctcagaagcactgagccgagtgtcctcgccctctcccgtgaggcaattcacaagctggctcaggtcttctctgtccagggttccatcgtcatcaaagtctaggcagcagacacagggagcaactaggatatgctcaagaggcagtctgcaggcacacacctaccctctttcctgtgtgggaaggagtggggcccagccattctcacagtgcttaccaaagatgcggaaggcatagtgtgacttgatgtctggggttgctgtgtcactgaagacactcaggaggtccaggaagtcctcaaagctcaggctgtctctggtaggtgatgtggagaagaccatgcagattcgctccttgaaagggttagcctgtgtaagaaagccttctgtgaacatcacagggcatgacctgggttacaaactcagccagctcaactggaaagtccttctgaggcagggtctcacaaacccatgctggcctccaactcctcatcctcctgcctctacctcccaggtgctggattgcaggtatgcaccaccatgcctgattcccttctggaaactcgaggaagctcattacaatagcggcactccatagagttcaggctcgaaggggaggacctttgaggccaggacatggagggcactggagggactactaagccagccagggaaggggcagtctcactcacacacatcacaagtagggtcctagcaggaaaagataggcacgttaagcatggccacaagaggagctgattatcatagttgtgcatgtgcacacatgagtacaggccactccacacatgtggaaatcaagggtaacttttcatagactattttctccttctaccatgggcgccagggatcaaacttaggtccttgggattacaaggcaagtgattttgtttctggattttcttttgtttgtttgagttgggtttctctgtgtagtcctggctgtcctggaactcactctgtagaccagactggcctcaaactcagaaatccacctgcctctgcctcccgagtgctgggactaaaggcgtgcgccaccacttcccagcctgtttctggattttcaagacagggtttctctataaaggtctatagagtctggctctacagaccagactggcctcaaactcaagagatccaccacctgcttctgcctcccaactgctggaattaaagacaaaaggcatgcacaacaaggcaagggtttttatctgctaacctacctggctggaccaagctgatcatttgtaaaaaaaatacttaactgggtgattattttgttacccagtcaggctctttgcataggaatcgcagacaagtgcatgcttttaattctagccctgaggaggcaaaggcaggcgtatccaagagttcaaggagaacctagtttacatagcaagttccagccaggacagccagcactccacaatgagaccctgtctcaaaatagtaattataacccaggcaatggtggcacacacctttcctcccaggcagatctttgagtttgaggcaacctggtctacaaatcgagttccaagacagctagggatacacagagaaacatcttggaaaatacaacaacaatacttattattactcatagcaagctgggcatagtgatgcatacatataatcctggtgctcacaaggcagggaaaggggaactgaagcaagttcaaggtcagtaaaggctatgtatatagtaaaagccgggatcagaaagagaaagtggtcggctggctcagccagtgcagtgctcgccgtggaaacatacagacctgcattcgatcctcagaacgaatgcagaacgaatgctggttttaaacgggaagagtgggctgaagagatggctcagggattacaagtccatactgctcttgcagaggaccctagttcagttcctggcacctgtgaggaacagctcacaaccacgtataaccccagcaccagggaaactcgacaggcaccagcacttacatgtgtacacatcccacacaattccatgtcatcaaaataaaaaccccagggtgtggtggcatgtgcttacaatcaataggaagggttagggaaggtactagcagagagagggtggatgaagtgggtagaggactgaaccttgagctctgggaggctgaggatctgctcaaacgatactcgggtgtgcagtgactcctccacggtccgctgctctgggggaagcagctcacaaaagcgtctgtgggctctggcagagagaggggaacttattggtggcctcaagcagtcagtctccctgtatttatgacatccccattctgcggtttgaatgccctataaaccagctgtgaaactaagtcacacacccaggattcccagtcattgggcaatctttagccaaagagggtaattcacaaaacagcagaggcttgggggggtcccttcttagggtgggcaattataagaacttacccatgtctgcaagacactatctgaagggactctgactagcttggtgagcatggttctggcaggccttgctcactctgcagggcccaattccttctaccttgctacaaacctacattgctaaagccagcccccaaagtctattcccctatttggccacttcctcctcctgaggccgacgaccaaggtccagctatcaaagtattcacgtccagcaatcaaaagccccctttggctaaaattaaacacctcctcgtagcccagggtttccccttatacctttataatctgccattttcctatgtccatgtctgtctcctctctatccagaggcagtcctttctcctgtaggacaaatactccttccacctctccattgttcccttccccttcttcctgtcttcgaactcatgtctttgttatttcttgccctctgtccctctaaggcaataaatctcctttgtgctaagaacttggtctgggggtcctgagctgcgactttccctttcagtgtcaggcattctttgcaacagtcctggcaggaaaaagataactctagagacatctgtgcctgtccctttggctattgaactacagaaacaatgtcccccgagaaattggaattccccggcaatctcgtgttgtgagaaggatgaattgaagcctgttgtctacttaggagaaaatgtctaccaggaagagattttacacagacggctctggtaacttgtcagaagatcacctttcatgagactagagctgagacaatgaaggagagactccatcttgcccaggactgctgcttaattttacatacccttgccctttatttaaatataaacctcacatcagctggacatgaagattgacttaaagatggggggaggagcggtcatgtccattcttagctttttttttttcccagtatggccacattggatacatttcgtttctctgcttttcaatattgtccctttccttggcctactgaggacaggtagcacagcctagctggttaggactgcctgtgtgggccaagtacctggactctaacattacagtaacaaaaacacatgttacctccactccagagactcctctcagccaccacctctttcccagtagaatttcattgtggggctaggaacctaactcaagcgctctggccagcaaatcacttatagtgtgctttatagtcaagttctcagaactctctgaacctgattccttgatctgtaacctcctcctgaagtaatgtgtggatcactcaggagctactgggcagagtaagggttcagtaaacgttaacggttactgaattaaacaggtaaagttgggattggagcgagccacgtacaagacctcttggttttgccagagggcaaagtccgcaaagagtcacagcagttccttttagaagcgagcaggaagctcggcagtgaggaggctagaggagctcaaacagttcaacttttcctggatacacagaagtgtttgcgtggtgcaaaggtgaggctctggagcgggtgggacttgcactctgagcctccgactccagatccagtgatcctgacatcccagaagcacagccccaccctcggaggtgagacgtccaatccgtatcccgcgagaaaagtacccgcaaagccctcccctggcaatcccgagttggaggaccggggtcagggcagcactcacaggaggatctcctgcttggtcaggaacgtcaggtcctgaaaggcaaatccagacaagggtctgcaagccgcccgaaagccacggccgccccgccacctgttccccgaaccccactcccctgcgcgggctcgcacgcgagctccgcgagaactggcgccccgcgcacctggtactcggccagcagctccttagacaggcgactgcccgaacctcccatcgccgcggtgcgcgcacagctaggccaactctccccgggacgccggcaactttctcacttccgtcctcggggccgcgtccccgcccagtccccgtagcaaccgctgcctggcctccgcccccgggcccgcccctgcctacagtgccccgccacccttagcgccgctcagcgggccggctcccggctccccgcgggcccaggagagctggagggagggcccggggaggagccggacgcatcggggcggggcccaggcctcgtggccccgccttctagtgggcggggcggaacgagccatgcgcacgtgatgcagactgcgcctgcgtcgcggtcttcacgcgtttgctgagttccgggacccgtctgtgcactgagccttgagatgcatccgcctcacctaaatcaagtgcagaagaccccagctctgggtggaggcgggtaacctccatactcgctcccgggctggaggagatccggtgcccctctgcggatagggtcagtcctagactgtctcacgggacaagagctgcagcctctgccaccgtgccaattcttccagaagaagcttagcttcctcttgaagtggctcttgaaggtgtttactggattgtgcagttatcgcccattcgtggaacagttagcaaggtaggcttccattttacaaacaggttcaatttcagtgatgtgtccggactccggtatttagaggtcagttctgtccacaggtccctcctgctgttttatcgtcacagctggggtgcctcctttgattcctcccacaaattgcgagcttccagctgtaggaaccaagatttgcccttctctcctctcaaataataatcagatgcaagtatgaacatatttacactgtgtgaaaaagtgaagattccaagcttccggaggaggaaatgtggattttgtgatctgggtggtcaacttggttggatctggagtcaaggagaagggaaacagcttgacactcctgtgagggattttcttttttctttttttttttttttttgcttcgtcacctggcacaacagggccaagtcaattacaatttatttgagaatattttaacttcgtactggactggtattcattcctagagaagtctggtccttcatccggccagtccagctagatgttccataccctctgggtaggagactgtaaaccttgcttctcatgcttctttctcgctgctccttctttagcctccaggagaggtgcaggctctaccgcaaagcccaggggctatggcttgctttcctggtccactcagggtcttacctcatagaaacccctgagcagagggattttcttgatcagtttatttgaagtgcgaaaatctactgcggcagtgcgctcaggtggcaacccgtaccaaacggaaacggaagatggcttttggcctgtttgccttggcttgctgataagtctctatcctgtacctgccactaaggatttcctttaatgacattagaatcatagtgttccagctgccaactcagattgaagaccaacagctctctaggaacccagcaccggcttgggactgcagagatgcatccttggggacagctgccgctgttgatcagcccagacaatactgagtaaaccaatttaataaatcccctcttagtaaatattcatcagttctgctcctcgagagcagtaattctcaccttcctaatgctgggaccctttaattcagttcttcacattgtggtgacccccagccataaaattatttttgttgctacttcataactgtaattttgctactgttatgaatcattatataaatatctgtgtttttcaatggtcttcggtaacccctgtaaaagggacaggactcacagattgagaaacgctgtactagagtaagctaatacagattcattccctccgcccctccccccaaatcaaggttatttaaaaaaaaaaaaaaaaaaaatatatatatatatatatatatatatatatatatatatatatatatcattgagttcattttgagttgttcatctactgcatggagcctgccctagagtgtggtgcctggtgtatagatttattcttgacccttctaactaattctcattctgagctttattaagcctgagcatgtatatcatactttaaagttactaaataggttgaacctggtggcacagagctgtaagcccagttatttatgagacttgtatcacaagatcacaaattcaaggataacctgagcaacagtgtgaaaccctagctctagacttaaaaaaataaaaaataaaataacaataataataataatgaagtaggggatagtgatgtgtcttagagtttctatggctgtgataaaacaccatgaccaaaagcaacttgtggagggaagggtttcattttacagctctcaggttaactctatcactgagtaaagtccagatgtcaacctggaagcagggacttaagtggacaccatgaagaaacactgcttactggcttgttcctcatggcctgctccaactgctttcttattccacccagtaccatttgcccaggggtagtatcacccaccaatcatctcccggacctgagcaatggcacttgcccagtgttcactgagtgccagttttccctgcatgtgtagtgaggtaaccatctgcataggacttaccaccacttccacgtgtgctttccactgcaggccatggtgatacccaaagcagtcacttttctatgggacaggtcttttttttggtttgttgttattaagacagactcatgccattcatattggcctggagctggctatgtagctattcttatttttaatttttctgtaattttttattttggtgtctgtgagt

SEQ ID NO: 309 - DNA, 2650 bp, Mus musculus
atgggccgggcgagccgctccgctgtcctgcggcgcgcgctgctgctgctgctgctactgctgctgctgcggacgacgactacgcgggcgctcggcccccggatcagtgtgccgctgggctctgaagaaaggctgattagaaaatttgaagctgaaaacatctccaactacacggcccttctgctgagccaggatggcaagacgctgtatgtgggggcccgagaggccctctttgcacttaacagcaacctcagcttcttgccaggcggggagtaccaagagctgctgtggagtgcagatgctgacaggaagcagcagtgcagcttcaagggcaaggacccaaagcgtgactgtcaaaactacatcaagatcctcctgccactcaacagcagccacctgctcacctgtggcacggccgccttcagccccctgtgtgcttacattcacatagcgagctttactttagcccaagatgaggccggcaatgtcattctggaggatggcaagggtcgttgtccctttgaccccaacttcaagtccacggctctggtggttggatggatggcgctgcggtcactctgggccctgagcagggcacagggactgggccaaaggagccattcccatgggaacattctcttggcagatggtgagctgtacactggaacagtcagtagcttccagggaaacgacccagccatttcccggagccagagttcccgccccaccaagactgagagctccctcaactggctacaagaccctgcctttgtggcctcggcctacgtccccgagagcctgggcagccccataggtgatgatgataagatctacttcttcttcagcgagacgggccaggagtttgagttctttgagaacaccatcgtgtcccgagttgcccgagtctgtaagggcgatgagggtggagagcgggtgttgcagcaacgctggacctcctttctcaaggctcagctcctgtgctcccggcctgatgatggctttccctttaacgtgctacaagatgtcttcaccctgaaccccaaccctcaggattggcgcaagacccttttctatggggtctttacctcccagtggcacagagggaccacagaaggctctgccatctgcgtcttcaccatgaatgatgtgcagaaggcctttgacggcctgtacaagaaagtaaacagagagacacagcagtggtataccgagacccaccaggtgcccacaccgcggccgggagcgtgcattaccaacagtgcccgggaacggaagatcaactcgtccctgcagctcccagaccgagtgctgaacttcctcaaggatcacttcttgatggatgggcaggtccgcagtcgcctgctgctgctgcagcccagagcccgctaccagcgtgtggctgtgcaccgtgtgcctggcctgcacagcacttatgatgtcctatttctgggcactggtgatggccgcctgcacaaagcagtgaccctgagctccagagtccacatcattgaggagctgcagatcttccctcaaggacagcctgtgcagaacctgctcttggacagccatgggggactgttgtatgcctcctcccattccggggtggtgcaagtgcccgtagccaactgcagcctgtacccaacctgtggagactgcctcctggctcgagacccctactgcgcctggactggctctgcctgcaggctcgctagcctctaccagcctgatctggcctccaggccatggacccaggacattgagggtgccagtgtcaaggaactctgcaagaattcctcatacaaggcccggtttcttgtgccaggtaagccatgtaaacaagtccagatccaaccaaacacagtgaacaccctggcctgcccactcctctcaaacctggccactcggctctgggtgcacaatggagccccagtcaatgcctctgcctcctgccgcgtgttacccaccggggacctgctgctggtgggcagccagcagggtttgggggtgttccagtgttggtcgatagaagaaggattccagcagcttgtggccagctactgcccagaggtgatggaggagggggtaatggaccaaaagaaccagcgtgatggtaccccagtcattatcaacacatcacgagtgagtgcaccggctggtggcagggccagctggggtgcggacaagtcctactggaatgaattcctggtgatgtgtactctgtttgtgtttgctatggtgcttttgtttctgttctttctctaccgacatcgggatggcatgaaactcttcctaaagcagggcgaatgtgccagtgtgcaccccaagactcgccctatagtgctaccacctgagacccgaccgctgaatggtgtcggccctcctagcaccccacttgaccaccgaggctaccaggctctgtcggatagctccccagggcccagagtcttcactgaatcagagaagaggccactgagcatccaggacagctttgtagaggtgtctcccgtgtgtccccggccccgagttcgactgggctctgagatccgagactctgtggtatgagagctgactttagatgtggtcaccctgacctcaggggttgtgagtgttcagtggaggtcagctacctctgcttctcacagaacacagc

SEQ ID NO: 310 - protein, 845 aa, Mus musculus
MGRASRSAVLRRALLLLLLLLLLRTTTTRALGPRISVPLGSEERLIRKFEAENISNYTALLLSQDGKTLYVGAREALFALNSNLSFLPGGEYQELLWSADADRKQQCSFKGKDPKRDCQNYIKILLPLNSSHLLTCGTAAFSPLCAYIHIASFTLAQDEAGNVIDGKGRCPFDPNFKSTALVVGWMALRSLWALSRAQGLGQRSHSHGNILLADGELYTGTVSSFQGNDPAISRSQSSRPTKTESSLNWLQDPAFVASAYVPESLGSPIGDDDKIYFFFSETGQEFEFFENTIVSRVARVCKGDEGGERVLQQRWTSFLKAQLLCSRPDDGFPFNVLQDVFTLNPNPQDWRKTLFYGVFTSQWHRGTTEGSAICVFTMNDVQKAFDGKKVNRETQQWYTETHQVPTPRPGACITNSARERKINSSLQLPDRVLNFLKDHFLMDGQVRSRLLLLQPRARYQRVAVHRVPGLHSTYDVLFLGTGDGRLHKAVTLSSRVHIIEELQIFPQGQPVQNLLLDSHGGLLYASSHSGVVQVPVANCSLYPTCGDCLLARDPYCAWTGSACRLASLYQPDLASRPWTQDIEGASVKELCKNSSYKARFLVPGKPCKQVQIQPNTVNTLACPLLSNLATRLWVHNGAPVNASASCRVLPTGDLLLVGSQQGLGVFQCWSIEEGFQQLVASYCPEVMEEGVMDQKNQRDGTPVIINTSRVSAPAGGRASWGADKSYWNEFLVMCTLFVFAMVLLFLFFLYRHRDGMKLFLKQGECASVHPKWIVLPPEWLNGVGPPSTPLDHRGYQALSDSSPGPRVFTESEKRPLSIQDSFVEVSPVCPRPRVRLGSEIRDSVV

SEQ ID NO: 311 - DNA, 64700 bp, Homo sapiens
  misc_feature (1)...(64700): n = A,T,C or G
gagatcaatttccagggaactagaaaggtttgtttgtcctattttttttggagggggggcgggggggacagggtctcgctctgtcgtcatgcttgagtgcagtggcttaatctcggctcactgaaacctccgcctcccaggttcaagcgattctcctgcctcagcctcctgagtagctgggactacaggcacatgccaccatgcccagctcatttctgtatttttagtagagacggggtttcaccatgttgatcaggatggtctcaatctcctaacctcaagatccgcctgcctcggcctcccaaagtgctgggattacaagcgtgagccaccgtgcccggcctgtttgtcctattttgttggctggggaggtaggtcatgtctgggagcagggaagagacattgagcccagggacctcctgtgtagtttttttctgatcccctgtttctgggactggaggctgtggctccctggggagtgagggggagggggtgggtgagatggaagtcctggaggaaggggaggggctgaaaggaggcagctccctctgcccagagcagaggctctactgaagacaagagtttggctcactagagcagggactacttctctgacgtagtgagcaatgtactttatcctgcaaatgtttgtagcgcacctcctatgtgccagacactatgtgaggcactggtgacatgacagcaagcaatctcagacagacatgtctcatgcctttgtggagtgcccccttttttttttttttttttttttgagacggagtcgctctgtcacccaggctggactgcagtggtgcgatcttggctcactgcaacctccgcctcccgggttcaagcaattctcctgcctcagtctcccgagtagctaggactacaggcacacgctgccacgcccagctaattttttgtattttagtagagacggggtttcaccttgttgcccaggctggtcttgaactcctgagctcaggcaatctgcctgcctcggcctcccaaagtgctaggattacagacgtgagccaccgcacccggccggaatgcccattttatggaggagtaaactgggaggacgagcagaaatatcaaaaaagccttaagtgctgtgaaggaggctttaacgtaggaaagtcggggttgctttcccaaggagcctgttgagcagagacttaaaactttactgcttgaagataatgcacagcatcgccctcatattgaactgtgttaaaatgaagaatcttcagcccccccccagatctacagtttctaaatgtgctatttatttttattttttatttttattttttttttgagatggaatctcactcttgttgcccaggctggagtgcagtggcgctatctcagctcattgcaacctctgcctcccgggttcaagagattctcctacctcagtttcccgagcagctgggattacaggcactcgccaccacacccggctaatttttgtatttttagtagagacggggtttcactgtgttggccaggctggtctcaaactccagacctcaggtgatccacccaccttggcctcccatcggcctcccaaagtactgagattacaggcatttgccactgcgccaggcctaaatgtgctttttaacaagatctcccaggtgcacagcagcatacatattagggtttgagaaacaaggctaagggtgtaactaagttaccagtctgggtgtagcttggaaccagaggagagcattctagctaagagccctgggatgggaaggagcttggagcagcatgtgaaagtcaaggaatatttgtgggtatttgcaatttttcttttttccgtaagtgggagagacttgatcatgttgaaaagtctttaggccatgtgcgggggctcagcctgtaatcccagcactttgggaggccgaggcagggggatcacttgaggtcaggagttcgaggccagcctggccaacatggtgaaaccccatctctactaaaaatacaaaaattagccaggcttggtggcacacacctgtagtcccagttacttgggaggcaggagaatcacttgaatctgggaggcggaggttgcagtgagctgagatcgcgccactgcactcctgcctgggtgacagagcgagactccatctcagaaaaaaaaaaaaaagaaaagtctttagaagtaaaccagttgagagggagggagtgggagacaaagtacagtggaagggtagataggaggaggggcagtttctgtaggactggcttcccaacccccaacctctgctgctggctcgaatcacctacagaatttgaaaatttacatgtgtttggctgggcgaagtggctggtgcccataattccagcactttaggaggcagaggcaggcggatcacttgaggtcagaacttcgagaccagcctagctaacgtggtgaaaccccatctctattaaaaatacaaaaattagctgggcatgttggcgggtgcctgtaatctcagctattctggaggctgaggcatgagaatcacttgaacccgggaggcagaagttgcggtgagccgagattgcacccttgcattccagcctgggcaacagtgcaagaatcaatctcaaaaaaacaaataaataaatactgatgttggttgggcgcggtggctcatgcctgtaattccagcactttgcggggccaaggcagacagatcacctgaggtcaggagatcgaggccagcctggccaatgtggtgaaaccccgtctctactaaaaatacaaaaattagctgggcctggtggcacacgcctgtagtcccagctactcaggaggctgaggcaggagaatcgcttgaacccaacaggtagaggttgcggtgagccaagattgtgccattgcactccagccttggtgacggagtgacactctgtcaaaaaaaaaaaaacacaactgaagcctggattcacccccagagaatctgattgaaatgatatgcagaattggccagctcctccaagcgattccaatgcgcagccagggtgtagaacaattactttggtgagaagaagggtaggaggggcagggcggtggggggcttgcagggagtagcttggaagtggatgaagcctgttaggtaccaaggagggcccatttacctaggttcccaattcagaaagagcttcagatttagactttgtatgttattgcaaaatgtatttgcacctatagccattgtacttgcgtgtgttaaagagcactgttttgttgtgtctaaacacgtaaaataactgcatttcttgtaaacagcaatctatccatccatctataccaagaccaccacccttttcatgaaagtagactgggtctctctcaatgcagatggaaaaaaataaggaagaccccatctgatgactttaattttgtttgtttgtttgtttgagacagggtctcactctgttgcccagactggagtgcagtggcacgatcatagctcactgcagcctcaacctctcaggctcgggtgatccttccacctcagcctcccagatagctgggactacagatgtgtgccaccacacttgactagtttttaaaattttttgtcgagatggggcagtgtcgctatgttgcccaggcaggtcttgaactcctgggctcaagtgatctgcccaccttggcctcccaaagtgatggaattacaggtgtgagccaccacgcccatcatgacttctattttggtttttggttgttgtggtttttgcaatctcaggccagagatcttcacttctgttttgtatgtgaagtaaaggacagaagggaaaatgtttaagagagttggtccagagagcaatgtagagaggtggccagagaaaggacagcccaggtggtgctgagggtctgaagctgataacctagatttgcaatggaaccctccaccctaagtgactctctccagccactgttgaggaagaggtactgagaaagtgggtcacagagctcatctagagctttctttctttctttctttctttttttttgagatggagtctcactctgtcgcccagactggagactggagtgcagagtgcagtggtgcaatctcagctcactgcaacctccacctcccgggttcaagccattctcctgcctcagcctccctagtagctgggactacaggtgcgtgctgccctgcctggctaacatctggagctttcccacgtggtgaaaatgaccacaagggatgttagagaattgaggcaataggttgttggaatggtggatctaagtgggtaagaagggaatggggagggagaaaggctagtggatcaggagaaggtgggacatcagtgacctggagaggctgctgaggtccaaggaaggtctgagcgagtgtgttaaaccaggaagtaggaaggaaaagagaagggagttagagactgggatgcctgaatttgggatcttgctgatggagctgtgactgctggtaaaattggagtggcggttgaagtggggtcagggaagtcaccagagatgtaagaaagtagatgcaggacttgtcaccaagacagtgactggagctttaggtgaagaactgggagccacatgcgaagtctctagtgacaaggaagtggccagaggtgggtggccagcctcagggctttttttttttttcttccagcagtttgttatagcctcagggtttttatcagaggagggaagacaatcattcaagaggggcatggggatgcctcaggtcctggggaaggagaggaagataggggagagatgcaggatggagcagaagcaaggaaagacaggggttctggaggatgccagtaatgtagagaaaaaagtcaatgagtcaatgagtcaatgaggcaggctcacacctgtaatcccagcactttgggaggccgaggtgggtggatcacctgaggttgagagtttgagaccagccatggccaacatggtaaaaccttgtctctactataaatacaaaattagctgggcgcagtggcacatgcctggaatcccagctacttgggaggctgaggcaggagaatcgcttgaacccgggaggtggtagttgcagtgaaccgagattgcactattgcactccagtctgggcaacgagagcaaaactccctctcaaaaaaaaaaaaaaaaattacaataaaaaaatcacaatgagatattactatgcacctataagagcagctaaaataaaaaacagtgataacaggaaatgctggcaagagtgtggagaaaatggatctctctccacattcctggtggaaatgtaaatggtacagccattctgcaaaaaatcatggcaatttataagactagatatgcacttaccataagacacagcaatggcattctttggacatatatctcagagaaatgaaaacttacattcatataaaaacctgtacacaaatgtttagagttgcttcatttgtaatagcccaaaactggaaacaacccaaatagccttcaattcaatgggtgaataaacttgagctagatatggtggcttatgcctgtaatcccagtactttgagagactgaggtgggaggattgcttgagcccaggagttgaagaccagcctaggcaacatagggagacccccatctgtacaaaaaaataaaaagttaaactctagtacatgcattccatgggatactactcagtaataaaaaggaaagaactattgatacacacagtgacttggttggatatatctcagaggcattatggttatcgaaaaaagccaatctctgcactccaggctggatgacagagagagacgttgtcttaaaaaaaataataaaaaaataaaaagaaaaaagccaatctcaaaaggttatgcactatatttacataacattcttgaaataacaaaactatacagatggagaagagattaatggttgtgagaggacagtgacaggagtgtgactataaagaggtaccgtgaaggagtaccccacagggatggaacagttcttgatggtggtggtcggtacacaaatgcattcatgggttcaagttacataaaactaaacgcacatatatatgtgcaggcacaaataagtgcatgcaaaaactgaacgataaggtctgcagtctatttacagcattgaccaatgtcaatttcttgattttgctattctactacaattatataagttcatcactggggaaagctggtgaagtgttcatgggacactatgtactattttgcaacttcctctgaatccataattatttcaaaattaaaaagttaacaggccaggcccggcggctcacacctgtaatcccagcactttgggaagctgaggcgggcagatcacgaggtgaggagatcgagaccatcctggccaacatggtgaaacgctgtctctactaaaaatacaaaaaaaattagccagacatggtggcgggtccctgtagtcccagctacttgggaggctgaggcaggagaatcgcttgaacccaggaggcagaggttgcagtgagccgagatggtgcccctgcactccagcctggctgcagagcaagactccgtctcaaaaaaaaaaaaaaaaaagttaacaaaaacatgtatctaattctaaaattacacattttaaagaacatgtaagaacaaaaacatgtatattaaacaccttaatggttttctatcaggagagggagcgggaggaggaatgaaataaacagctacattaatcaagggtccctgtgcagacaaatgataataatgtgctgtgaaccgaaaaggtattaagtcaaacttctctgcacctgaggtcctgcagagaggaaagggtatgtgtgttgggggtcgggggaggagatgagagaaggggggatcaataacattaaagacagggctttatttcaaataaagattcaaaaatctttatttaaagatttttccctttgttcaatagaagactggaggaggttggaggaggagaaggagcaggaaaagggaggagggagaaggtgccggagtgggcagtggaaagtactcttctggtctggggaccactagctgaatccctgaggagctctgaggccccacgggggagtcctagtttccaggtgcttctctgagcagtggtgctcccaaggtgctctgtgtgctggaaaattggaagtgctgattttaatttttattaaatctgttttaattatgttaatattttttctagagggtgttatggagaaagaagtgctgatttttaacatcgcctcttgcaaggcacagcttgcaggtgctgggtgacctaaggcaagacccctaatttagctgtgctttccatatccttagcaaggagtgtccccaccccagcactgtttgaaaggcagagctcataagaggattgagaggattttaaaagccgtttgcacaagttcatggccttagttataaacgcagtacatattgctactaattggatgactataaggaggaagaaagaatataaggggcaaaaggaaacaattcaggaagtgcataaaggtttattgacaaggatgctcatctcaacattacttaagataataaacaattagaaacaacttaaatatccacttggttaaaaatgtacggtacattcgtgtgatagaatacattaaaatgaaagtatgcaagaattcttacatttatttatttattttttatttatttatttatttatttatttattttgagacggactctcactctgttgcccacgctggagtgcagtggtgtgatctcagctcactgcaacctctgcttcccgggttcaagcgattctcctgcttcagcctcctgagtagctgggattacaggtgcccaccaccatgccctgctaatttttgtattttaagtagagacggggcttcaccccatctctactgaataccccatgtattttcagtagagacggggttggtcaggttgatcttgaactcctgaccttgtgatccgcccacctcagcctcctaaagagttgggattacaggcgtgagccactgcacccggcaagaatttttaatgttatagaaaaatgcgatataggccgggtgctgtggctcacacctgtaatcccagcactttgggaggcaaggcaggcagatcacttgaggtcagaagttcgagaccagcctggccaacgtggtgaaaccccgtctctattaaaaatacaaaaattatctgggtgtggtggtgggtgcctgtaatcccacctacttgggagactgaggcaggagaatcgcttgaatctgggaggtggaggttacagtgagccgaaatcgcaccgctgcactccagcccgtgcaacaagagagagactccatctcaaaaacaagaaaagaaaaacataatagaatgctgtcctaagtaaaagttagaaaacagtatgtattgaataatcttttttctaaaagatgtaagtgtataattatgcataggaaacacacaggaagatattcaccaaaatattaacaccagtatacctaagatttgtgcagtttactacatgcaaattaatcttaatttttaaaaagttttaaaaaatattaacgctgacggccgggtgtggtggctcacgcctgtaatcccagcactttggggggccaaggcgggtgggtcacgaggtcaggagttcgagaccagcctgtccaatattgtgaaaccctgtctctactaaaaatacaaaaattagtcaggtgcagtggcggacacctgtaatcccagctacttgggaggctgaggcaggagaattgcttgaacccgggaggcagaggttgcagtgagctgagatcgagccactgcactccagcctgggtgacagagcaagactccgtctcggaaaaaaaaaaattaacaaggttgatgccaatgtgtaggtaaaatgaaattatgagtgatattatttttaattgtgtttttctgttgtctaactttcttgtactaaatatgtgtttacttttatagagaggtaacaaaagtaaccacttttttctttttctggaggagctaggcagcaattcccggagaggagaggctgcagaaggacaatgtacacttaggccaggcctgcccggccctggaacgggctgccacttggcctctggtttctgcagtcccttgacccgtcagttcaggccagctcagccacttacaagtccagaactggttgtttcagtaaccgccctgaaagctgccgttgctttcctggaagatagcaccgggacgcaagagtggagagggaggagccaaggtcacctcataaatgcgggatatttataaccctatctttcacccctcctgcagatctccgtttcgttttactctctgagcacgcccgcccactgcatgttaagggagcagtgagcagcatttatctcgggtggagacgtgggtggtttcacagagtgtggatctgccctcctctctctcacttgcctccttctgtaaacaatattaccattcttgagagctgaccatgtgccaggtgtgtgcctccaccattgcatttcccatcacagccttgtgagatctctagtgttctgatgcccactttacagatgaaaaactccaggctcagagaggttaaggaactcgtcctacgtaacacagccagttaggtaagagtggatctaggatttcaacccgggccagcccagactccagctagtgaggccgccccctgtggcccaggtccagcgaggccgagtctcccaaggtgaaggaccgcacagtcccttgggctccacggctaacttgggccgaccagcggtcgtggggaggcggacccgacaggccagggtggtcgtggcatcgagtccatcgttggtgcaaatggccgggggccggtggcggtggtggggcggggggcacggcccgcatcaggcaaatcccggaggcgccctctggacaattcccgtaaacacgggcagagcggggcggggctgggcggggcttggcgggggcccagcatttccggggacgccgcgccggactgaggctgtgcgcccgagactccgggtccccaggggctgcgccgggccggcctggcaagggggacgagtcagtggacactccaggaagagcggccccgcggggggcgatgaccgtgcgctgaccctgactcactccaggtaggcgcggggggtgcctggcgaggtgggagccgctgcccgggaggtggcggaccaggcgaaaaccgccgcgcagccgctgcccccacccttgcacccgcacctcccgcccggcccctctccccagaaggcgccacctgcacgctctgatgggcactggggcccgccgcccggggagcctgttgccatggcagcgcaggaggctgggcccgcgttcccatggccaccgggggcctttgagcagcgttcacatcgcgccagtgcaccacccctactcctaaacccgggacctggtcctggggggaagtcatttggaattcggaaaaggcctgggcccctgcggaatggtcgtggatatgacctccgagttaggccctttgtcatggcttctttcttctcactgagcaccaaggtgctagaaggagaaggctagaaggagaaggaagttgaggttctgggcatgaagctgcagttgcggctactcgggagttattctggtctagcagaaaggcgaaggagccctgggtcatctcgggaaggtcatcaaatctctgcccacatttcctcacctgtaatatgggtatgttatttgagttaaacacaggattcctctaaaggttgaaatgccttaaaattttgtgcgggaagcatacaaacttttaaaaagtttttttccccataatgccttagaactggaaaagatgtagaaatcaccttggcccatcccccctcattttcataaggaaaactgaagccagagagattaaatcgcttcccaagatgacagtgagttagtgggaaggtcaggatttgaactcaggccatggccgtttcttttggtgattttttttttttttttttttttttttgagacggagtcttgctctatcctccaggctacagtgcagtagcgcgatcttggctcaccgcaacctccacctccctggctcaagtgactcttctgcctcagcctcctgagtagctgggactacaggcgtgtgccaccatgccaagctaatttttgtatttttagtagagacagggtttcaccatgttggctaggctggtctccaactcctgagctcaagtgatccgcccactttggcctcccaatgtgcctggtttataggcttgagccaccacgcctggcctttttggagattataccttctgaagctcaggaaaatctaggatatgtctccttgcacctggggctcaaactgttggtgacaggtaatctccatatggggacattggccaggcatggtggctcacgcctgtaatcccagcactttgggaggtcgaggcaggcggatcacctgagctcaggagtttgaaaccagcctggtcaatgtggtgaaacctcgtctctagtaaaaacacaaaattagctgggcatggtggcgcatgcctgtaatcgcagcgacttgggaggctgaggcaggagaatcgcttgaatctgggaggcggaggttccctgagccagccgagattgtgattgcattccagcctggacaacaagagtgaaactccatctcaaaaagcaaacaaaaaataaaataataaaaataaaggccaggcacggtggctcacgcctgtaatcccagcactttgggaggccgagatgggcggagaggtcaggagatcaagaccatcctggctaacacagtgaaaccccgtctctactaaaaatacaaaaaattagccagacgtggtggtgggcgcctgtagtcccagctactcgcgaggctgagacagaagaatggtgtgaacccgcgaggcggagcttgcagtgagccgagattgcaccactgcactccagcctgggcgacagagcaagactccgtctcaaaaaataataataataaaaaacaaaaaaataaaaataaaataaataaagattggggacattggcaacagttgaactaaagatgggaaacggagacttgtgccttggggagagctgagtctccccgctgcatgggtcttgtgccttgaggctcttgctttaatgtagtatctgactacattggacaggatggtccaaagtaagtccctgggagccaagcattcagccactctccaaaataccatctcttctgaagccagcaaagctggtgagcctggagctaagcaagaaaactgtttagcttccctaaagcagggaaatgggactctagtcctgcctctatccgtgtggtgctgtttcctttgaaagggataacagaaaagtgggggaaaagatccaggaaggaaaacgtgaatgaatcctttggaaatgatttgagacagctagagcagaagacatttgctgggtacctgctgtttccatgttctgtcctggggctggagatgaaaaagctgagttaggcaggccttgtccctgcattcaaggagcttgtagaagagaagggaagagagggatgtgatgtgtaagtgagtatttcactgcagcataatgaggtcctaataagaatctgagcagagtgcagagggaactcgcaggagcaactctggaaattagttgaaaacagcaggattctagcctgggagcacttctagaactctgccaagttggccgtggccactacctttgttggaaacaaagcataagggagtgaaagtgtctaaagaaaggtgggggctgggtgcagtgacccacgcctgtaatcccagcattttgggaggccgaggcaggcagatcacgaggtcaggagattgagaccagcctgaccaatatggtgaaatcttgtctctactaaaaatacaaaaattagccgggcatggtggtgcatgcctgtaatcccagctactcaggaggctgaggcaagagaatcgcttgaacccaggaggcggaggttgcagtgagctgagatcatgccattgcactccagcctgggtgacagaatgagactccatctcaaaaaaaaaaaaaaagaaagaaaagaaacgtgggtcaggcatggtggctcatgcctgtaatcccagcactttgggaggccaaggtgggtggatcgcttgagtccaggagttcgagaccagcctgggcaacatggtgaaactcagtctctacaaaaaatacaaaaattagccgagcatggtggcccatgcctgtagtgtcagctatccagggcgctgaggtagaaggatcacctgagccaagggaggttgaggcttcagtgagccatcaatcatcctgccactgcattccagcttgggtggcacagtgagacactgtctcaaaaataaaataaaataaaagtagccaggcgaggtggcttatgcctgtaatcctagcattttgggaggccgaggtgggcggatcacctgaggtcaggggttcaagaccaggctggccaacatggtgaaaccctgtctctactaaaaatacaaaaattagccaggcatggtggcgcatgcctgtaatcccagctacccgggaggctgaagcaggagagttgctggaacctgggaggcggaggctgcagtgagccgagatcgcaccactgcactccagcctggacgacagaacaagactccgtctcaaaataaataaataaataaaaataaatgtagatcaggatacgtattgtctttttttgtttgttttttgagacagagtctcgctcactctgggtgcagtggcgctatctcggctcactgcaagctccgccccccggattcatgccattcttctgcctcagcctcccgagtagctgggactacaggcacccaccaccacgcccggctaatttttttgtatttttagtagagacggggtttcaccatgttagccaggatggtctacgatctcctgacctcgtgatccgcccgcctcagcctcccaaagtgctgggattataggcatgagccaccgcgcccagccaggatgaatattctctgaaagaacagtttaaaggatcctgataaactaagctctgtgaaggcagcaaccacgtcagtttccttaaacttgagcaatacttagaaggcagcaagtgcacaagaaatatgtgttgcatgaatgaaagaaggaagtgggggggaggaaggaaaaggaggaagtgagcgagggcaggaagaaaagggaaggaagggagaggagagaagtgaaggaaggaagaaaaggtaggaaggagggagggaaggaaagaaggaaggataaacattggcttatattatcagaagaggtggatggctataacttgagacaaaacgtggttgatttctgactataggttgaatatccatatgggttctggagtcagcagatctgagttgtggtcctagtcctgacttgtcacttgtgtgaccttagtaagtcctggaacctctctatgccccaatttctcacttctgaaatggcaataataactgatatctcaccctgtagtgagaattaagtaaatgattgaatgtaaaaatttggcacaatcctcacttatagtaggtgctcaataaatattaattagctatataaatgtcaactttgatgtagctggaaagaatttgccaaatatttcatgtcaaggttatataactattccaaactgaggtataatttctttttttctgataaaggctaattttgaaagttccttgtgtctgcagactaacgcaccttagagaaatggttctttactttttttggcggggagtgggggctggtagcaaggagcttttgaaattaaatgaaagctctgattccctctctcctgaaatggcatctcattcttggcgttcacagctccctgaagcccacccgtgtggtgaagggggtccctgctctgctgcactgctcacaggctatagtgaaagaactcaggcagcattcatagaagaggtggctgggaggagcaagcagggtcagccgtctttcaaggggtttgtggaaaccaaaagatgagacggctagagataagcacatgtggccccgtgggtgcgtcctcttagagcccactctcctgctagggccaagctggggctcactcagaaccttgtgggctccagagtccctggtgtggtgcccaccagccggaccctcattcacagtgcataaatggtgctgcagggtggctgctgtgtgagattcctatccaggcatggatctttggtgccaccctcacatcagctttctgtgagtgttgtctcctaataccactgctttagggtggcaagtgggcacactgccacaggtggtgcattcctcagaacctccaccctggcaaagcagggtgagagtacagcctacagagccttaggagatccgtggcaacccgtctgtgcatccccgctacccacctaggcatacctgttcctgcccactctctgggatcagcatcagaaccaagagcaaggctctgtctgggagtaagagtggcagccaccaggtgacctgaggtgatggggaaactccagggtcagagagctcctcctccctgggaaggaagaggcagaggggagagccttgggcctttgggaaggaaggttggtttcctgaggtggagggagggccctggcctgttcctttttcccctcacaggggtctggtgctcagactgggattttagagggaataactcgatagcaaatggggaggtagattcctcacttcatgggatctttggaaccagggtgtgtgtctgtgtgtgtctgtgtgtgtcttgctctgtgtctgtgtcagtgtcttgctctgtgtgcatgtgtgtgtatgtgtgtgtgtcagtgtcttgctctgtcacccaagctggaggtaccatcgtgactcattgcagcctctacctctcaggttcaagtgatccttgcacctcaaccttccaagtagctgggaccacaggagcacaccaccacacctggctaatttttaatttattttttgtagagaccgggtcttcctatgttgcccatctggtctcccctggacaggcgagtgggtgcaaaagcagaggcagacagcgcctcctgaactcatattgggggagcagaggagtgacagtggcaacttcatgttctaccctgtcagggcagggacaggttgagccctgctgattgccccacagccctgtggggcggagggatcccctcccagggagtggccagctcaggccccaacaggccccagtgggggtggtgctgggtgtcaggctcctcaccacagcggacgcacctgggacttgggctgggcgggccggttctttctccccatgagagttgcagcctcagcaccagctttgcaggaggtggctgaacttgagggagtacccagaagggggtcctcagagatgggcatctaagatacttcagagttgttgacgccatggggcaactttcatggggaggtgaaccaataacatagcaggcatggccttgctcactgagcattcactacatgccagtgttgcccgtggctttatatgtactctctccagccacccatgaagtgctgttcatagcactccgtcctagatgaagaagctgaggttcagagtgattgtgtggcttgctaaaagtccacaaaatatggaaggtagtgaattcttctgacagaagaacctgtgtgctcaaccactggattctaccacttccaggagcaagaaaaacaagaggccggtagcggggaaaatggtttggggaacggagatgaagccatttatttacatctgttgccagaccctgggtaaaagctgccagtgagttttgaaggcagtgtaagtgctgacccggggtggatgccctctgctgcagaaggcgctgccccaaggaagctcccagccctgaggacttggcagccattggctgatttgaaagaatacacagggtgtgccagctggtgtcgcttcctcttcaacatgtactgatgctgcagctgagctgctgcccagcccctggggagaagacaccagcagcatgcccagccagggcagggtggagagctgcagctgcaggttggcataagaggagagctcagggctacaaggggatggtggtggggggccaaggcctggagagctgggctgcagccagtgtatgtctgcgaggccttgctgggcagcctgccagtcagcacccgagaatggggaggagcttgagtgctaccccaggagggggcgggtgggacctttgggttcaagctccactgggcttggcaggaggcccctcccccacagccagcaaacaaagcaacaactcccagagtagaactgtgggagctccagagccaggttcccctgggtgggaattagagcaggcagacctggccaggagccgcctggcagggaccatccatgcccaaggacatggcctgcatgcagctgggcagaggctgtacccatggatgattaatgggtattgatcacttgggaggccagatgtagcctggacactgctggcacttgccctgcatctgttccctttgtactgggcagggtagagaagcagcagggatgtgtgttcatttgctttatacttttagccatgcttccctttattttctttcccttgtagcttttttttttttttttttttgagatggaatcttgctcttgtcacccaggctggagtgcagtggcacgatcttggctcactgcagcctccgcctcctgggttcaagcaattctcctgcctcagcctcccgagtagcagggattacagcctcacgccaccatgcctggctaatttttgtacttttagtagagatggggttttgccatattggccaggctggtctcaaactcctgaccttgtgatcctcccgccttggcctcccaaagtgctggggttacaggcatgagccactgcgcctggcctcgtttcggcctctttataatggattcctatacacattcttgtgcttctgtccttgtgtatgtatgtgtgtgtgtatgagagagagaaaaatgaggaaggtccatggggaggaggtgccagagcgtgtgagtgtggatggagaagaggccagctttgatgatgacttcattttgctggccaaggcacggaggaagcagtgcttttctcttcgtctcttattttggtactccctttccaagctgcctcctgagctctttataaacactggcattctggctgagaaagactcgccaacatccaagagtggcaaaggggaacaggagacacatcgttggcttgggaaccgctcccgctcgcaggaagtctgctcacaggagatttttctctgtcagtgtcctcgtgtggtttctagtctggggagaacacatcagcacactaacggaagaaaggggagcccgcaaagaccaaagctgctgtgctgggggcgtggattcgagggctcttctccaggctgacagctgggaccctcattttgtcagccctgtggagttcctactagagtgccatgcaaggcagtggggatttggaagatggaagtcctgtcactgtcctcaaaggacttgctgcccagtcgacataagacatattggaagcatttgagcaggatatgattatccgcttagtgaggccgcatcagcccctgtctcctctgctctgagatgagcacagcagtcacacaactcatgtgttgccaagacaccagggcaaagcagccccactgccattttaggatctgcttgatgtggagattcagggactcaacaaatagtgattgagcatgtggccaacatcaggtactgttctaggtgagtgcagtaggcagaaggtagaagaaggaaatgtagctagtaccttgactttgacaagatttcttgcaatctttttcataatattctttttttttttttgggttggtcggggggacggagtttcactcttgtgcccaggctggagcacagtggcgccatcttggctcactacaacctctgtctcccgggttcaagcgattctcctgcctcagcctcctgagtagctgggattataggtgtgcaccaccacgcccggctaattttcatatttttagtagagacagcgtttcatcatgttggccaggctggtttcgaactcctgacctcaggtgatgcgcccacctcagcctcctaaagtgctcagattacgggcaatgagccactgctttcagcccataatagtcttatggataatatggagaaatgtgggctgaacagtgcagttaggaggacacatagctagttgttcagcctataaaagatattgatcaggccaggcgtggtggctcacacctgtaatcccagtactttgggaggccaaggcaggtggctcacctgaggtcaaaagttcgagaccagccgtgaccaacatggtgaaacctcgtctctactaaaaatacaaaattagccgggcgtggtggcgcatgtttgtaatcccagctactcgggaggctgaggcaggagaatcgcttgaacccacgaggcagaggttgcagtgagctgatatcatgccattgcactccagcctgggcaacaagagtgaaacaccatctcaaaaaaaaaacaaaaaacatattgatctgttctaaccttgatggaggtctctagtggcgtgccattgggctccgtttgtgactctgtctcacccatttatttatttacttacttattttcaggctcccaaagtgctgggattataggtgtgagccaccgtgcctggctgtcacccatttttgtttaatcactcaaaattttaaatggaaagattagtacaaaaacacccaataactcttcacctatattgaccagtttttgccagtcacattcatgttctttctctctagtacatgcacatacatatatatgcacatttgtttttgctgaatcatttgaaagtaagttgtagacatcgtgacatttcaactgtaaagcttcagcaggtgtctctgaaagaccaggacttaatcacatctgagaaatgccattatcatagctaaaaaaatgaagaatgccataatatcatctaatacacagtccatattaaaatttccccaattgctccatggctttttttttttttccaacattcaatcttcaatcaaggttcacacgttgctattgattttgtttgtttttttttagacagggtctcattctgtctcttaggctggagtgcaacagcatggctccctgcagctttgacctcctgggcttaggtgatcctcccacctcagcctttcaagtagctgggactacaggtgcgcaccaccatgcctgagtaattttgtattttttgtagagaccagtttcaccctgttgcccaggatggtcttgaacttctgggctcaagtgatccacctgccttggcctcccgaagtgctgggattacaggtgtcagccacctcgcctcgctgcatttgattattatgtctttttagtcccttaacctaaaacagccccacccctgtctgttttgcctctcactagattgccctttctgaagagtccaggctagttgtcttgtagaatactactcatgctggatgggtctgattgtgttttcattgttagatctgggttacaacacacctttgagaagaatgctgcaaacattgatgatgttttgtacttgttgttttttctttttttgagacagggtctcactttgtcacccaggctggagagcagtggcgtgatctcagctcactgcacccttgacctcctaggttcaagcagtcctcctgcctcaccccccgaagtagctgggactacaggcatgcgccaccatacctggctaatttttgtaatttttgtagagacggagttttgccgtgttgcccaggttggtcccgaacccctgagctcaggcagtctgcctgcctcggcatcccaaaatgctaggattccaggcgtgagctgctgggcccagcctgttttgtacttctctttttttttttttcgagacggagtctcgctctgtcaccaggctggagtgcagtggcgcgatctcggctcactgcgagctctgcctcctgggttcacgacattctcctgcctcagcctcccaagtagctgggactacaggcgcccgccaccatgcctggctaatttttttttttttttgtatttttagtagagacggggtttcaccgtgttagccaggatggtctcgatctcctgacctcgtgatccgcccgcctcggcctcccaaagtgctgggattccaggcgtgagctgctgggcttagcctgttttgtacttcttattgcatcatatcaggaggaaaattacgtcaaatagtcccattactatgatgctacttttgtctaattggttaagattgaggccccgagatctctcccttagagataaatgttccctttggtaattagtaagtcatctgtgggacagaccttgttaacatatagtttcgtaacaatcttccacccaatggtttcccatccactgatgattcttacttgaatctagattttctaattctatcaccatttcttctactttttttttgagacagagtctcgctgtcggtcaggctggagtgcagtggcgtgatctcggatcactgcaacctccgcctcttgagttcaagagattctcctgcctcagcctcccgagtagctgggactacaggtgcgtgccaccacgcccagctaatttttttgtatttttaatagagacggggtttcaccatgttagccaggatggtctcgatctcctgacctcgtgatccgcccgcctcagcctcccaaagtgctgggattacaggcgtgagccactgcacccggcctcttctacattattaaccagcattttttggtaaagaaaagcttccttttcaccccttattttttctctctctctgggtttcactgtggactaatggattgtttttaaatttaatgtattaatccattacttcattatgttttaatgctcagattggtcatcaagctggttccgatgtcctttggacatggcctcattagtttctgatcattgctttctggcccaacaaaatgtctcatgtttatgtcgtactttcccttacattcacccaaagaatcttggttctcttattagagagtaggattaggaaaccaagattggccaggtacagtggttcatgcctgtaatcccagcactttgggaggccgaggtgggcagatcgcttgagtccaggagtttgagaccagcctgggcaacgtggtgaaacccctttctctacaaaaaaattacaaaaattatccgagtgtggtggtgcatgcctgtagtcccagctactcaggaggctcaggtggaaggattgcttgagcctgagaggtggaggttgtagtgagctgagatcttgccactgtactccagcctgggtgacagagtgagaccctctctcaataaaaaagaaaaaagtaaacgaagatttaggtgctagatctgctcacccaatttttgtttttttgggacggagtctcgctctgtcccccaggctggagtgcagtggcgcgatctcggctcactgcaagctccgcctcccgggttcacgccattctcctgcctcagcctcccgagtagctgggactacaggcgcccgccaccacgcccggctaattttttgtatttttagtagagatggggttttactgtgttagccaggatggtctcgagctcctgacctcatgatccgcgcacctcggcctcccaaagtgctgggattacaggcgtgagccaccatgcccggccctgctcacccaatatttttatcaatagcttgaataaaggcataaggaatggttatcatgtttacagatgaccccatactggaaggggaagccaaatgtatgataatagaatcagttttcaacatgacttcagtgggatgacatctgagccagaaccactagatttatttattttattattaattaattaattaattttttttttttttgagatggagtctcgctctgtggcccaggctggagtgcagtggcgtgatctcggctcactgcaagctccacctcccgggttcgcgccattctcctgcctcagcctcctgagtagctgggactacaggcacccaccactgtgcccggctaatttttttttgtatttttattagagacggggtttcaccatggtctcgatctcctgacctcgtgatccgcctgcctcggcctcctaaagtgctgggattacaggcgtgagccaccgcgcctggctggtaaaactctttattggaccaaagttgatataaaaaaaatagttctggttgtcagctgacatgagtcagcagtattctgtgactcaagttgcattcattcattcattcatccagtacttactgaagtcctgcttaccatgtgccaagcactattctagaggcttgagatacattacttaacaaaccaaataagcaaaaatctctgccctctcagtcagcattctgggggagatgggatgtcagacaataaagaaaaaccataactaatatatcgtatgttattcagtgatgagtgctctgaaaaaatatctcaaggtatttttaaggagataaggggcatattaggaggaagttcagattcttcaaggtgataaatgagcaaaaggaagcaagggactcagtcctgtggttatctagggggagagtgtgccaggtgagggagcagccaggtcaaaggccctgctggttcgggctactatatatgtacctggtgtggatgagtgaggggaaaagtagtagaggatgcagtggtactggtggtgaggatgacatggagggctttgcagaccactccaagtaaggtcattgtgaatgagatgggggaacccttggagggttttgagcagaggaaagccctgatctggcttgtgttgtgtgttgttttgtttaagatggagtcttgctctgtagcccaggctggagtgcagtagcacaatctcagctcactgcaacctccgcctcccaggccccggttcaagcaattctcctgcctcagcctcccgagtagctgggattacaggcacacaccaccatgcccagctaatttttgtgttcttagtagagatggggattcaccatgttggccaggctggtcttgaactcctgacctcaagtgatctgcccgcctcggcccaccaaagtgctgggattacaggtgtgagccaccacccctgtcctggcttgtgttttaaagactcactccagctgctgtgttgagaatagattgtaggggaaccaaggaggaaacggggagaacagttaggaggcccttgcagtaaccaggagaaagagggtggtgcctgggccctagggagctgggaagtggtcagattatagattttctaatggactggatgtgaggagtgagataatgagaggagctgagggttttggcctgagcaatttaaagatggaattgccattaaatgaaatggggaaggctgtaggtggagcacatttttgagaagggggagagatcaggagcttagtttgggacatgttgggctcgagatggttttcagacagccaagtagaaatattgaggccgggtcaggtgtggtggctcacgcctgaaatcccagcactttgggaggccaaggcaggtggatcacgaggtcaggagttcaagaccagcctggccaacattgtgaaaccctgtctctattaaaaatacaaaaaattagcggggtgtggtggcataaacctgtaatctcagctactcgggaggctgaggcaggagaatcacttgaacccagaaggcagaggttgcagtgagtggagattgcaccattgcactccagcctgggcaaaagagcaagactctgtctcaaaaaaaaaaaagttgaggccttttggagttaagggctgagcagggctggactaggcggcagataggggtttgggtatcactggctgtaggtggattgaacccatttagagtaagcatccaaacctgggcaatagtagcactgtgggtgcttggtgctgtccatatcccatgtggaattctgtgtccagttctgggagcccctttaaaagggatgctgctagcctgcaccatgtccacagaaggtgatggaggtacagaaatcatgcagcatgaggaaacttagctgtaagaaaggagacctgggaccatgtgggtgctgtgcccaccctcttgacagcatccctgttgtgggagcagatgtggcagaccctgaaagtcgggaggagaggaaaagaggtgctctgaggaggctgattttggctgggggtgaagaggagctttcctgcaattgcagcaaatttatggagcgatggtctctactgccatggaaataactagcagaggctttcactcttttggactcttaactacaggaggaactactacatttttctgtaatcctgtgcacacttaggaaaagttgaagtagctttcccaaaattacttatcctttgagattattgcttagatagtttctatgttttgtttgtttcttaatgctgttgggatccactaaattgatttcagaatctgctaatggtccaggctgcagttggaaacccctggtctcagcagagctgaactccacccgtggagatgttaggagccaggaggattaggggtgggtgcctctgggcttccactccagtcttaggggttcccttcccctgccgggtcacgtgcaggttgtgaaggttttacctcctcagcagtacattaaatcctattatcccacttaagctaatcttgcccttcccccacccgagggcttcgcgtggacagaatattaagcggacaagcccgcagggtgcctagactaagtgctgagcttgtagtgaatgcccagccatgacttgcagtggattgacctgtgcaaaaattggactctcaagctgctagccccagtgtcagcacgagctcggccgagttcatttggtcgcaggaacaagggggtcgccaggagcaagagcggagggggcgcctaaagggaggagaccaaggcctaatcaccatccgccccctaactccctaggcgcatagcggggacgcagcgtgtccccaaaccaacgccactagcagagggtcccagaggagccggaaggggccagggcctgggcggcggtgggagggtctgagcagtgggggcggggagctgggggtcggctttcgtccgcgtcccagcgctccggcggccgccggggctactgatcccgggcttggcccctgcggcagcgccccgagctgccgcccctcgcgctgccagcgcccgggaaggaggaagggggaagggggcgggccggccgggctcacggccgacttcctccttcagccccgccctccgccgcttgcgggtgagctctgcccaagccgaggctgcggggccggcgccggcgggaggactgcggtgccccgcggaggggctgagtttgccagggcccacttgaccctgtttcccacctcccgccccccaggtccggaggcgggggcccccggggcgactcgggggcggaccgcggggcggagctgccgcccgtgagtccggccgagccacctgagcccgagccgcgggacaccgtcgctcctgctctccgaatgctgcgcaccgcgatgggcctgaggagctggctcgccgccccatggggcgcgctgccgcctcggccaccgctgctgctgctcctgctgctgctgctcctgctgcagccgccgcctccgacctgggcgctcagcccccggatcagcctgcctctgggtgagtgccggggacccggggacgcgggccgggggaaggaaggctgccggggacgtgcctcgtgcggaggtggccgtgacaaaggaccaaggaggggacctgtcggaggcacgggatccattaggaccccttcttttttcaaggcgctgcgcggagggagggagaggagaggggagctgtggggccgctggcccctttcttcagttttctttctgcgtagggatggggtctagcccgctctgtcgtcccccctagttcccttaggaggatgcactttcggcggggtccgcctgcccatctacttgtctttgatgctgaccagagccgaccgcggtgccgcccccgagggcggctcggggtagagggaggccactgcttgcagtcctataaacactggggttctggtattcccagcaagtcgcagcagggccgggagctgtggtgggcgggcaggcgcccgatcctccctctccgcccctccatccctggcttgccagtgcagccccaagccccagcatggagagacctccaggccctgggagcgaccagactgcggatgggggcagctctgggcgctgacattcccaagtcctgggagcgaacagactgcggatgggggcagctctgggcgctgacattcccaagtcctgggcgcgacccctcctcagagtgacctgggagtagcatcctggttggctgggttcctttcctggtcctcacatctgcttctgtggccacctcctgtttcagccctccgcccttccctctccttttcccttccatccggttgcttctccagctcttcttggggcacttgggctttagattcagagggtcctggatcccaagcccatttcttccactgggcaagtaagtgccttctgctcccagtgccccacctttctcatctgcaaaataggcagtcgtaggtgccttgcaaggtgtgttactcgggtatgaagtttataagtgcccaacagatgtatccgcaagccctttaacttgttggttgtcatattgtatgacttggaataaagcatgtatgaattagaggttacagactgaaactgtcccagacttccatctcctcacagcatccccacctctaaaagcatcctgtttacaaagggaaatagtagaatcagcacttaaattaaggcagggccctagcggcttcaagtaaccctacctgaacccctgtctgaaatactgcagatgacctgggttcaaatgctacctcagccacttagtaaccatgtgaccttgagcaggctacttaaagtttctgggtcttgatttcttcatctgtaaaacaggtataataacagaacctacctcaaggtagtgaggattaaatcagctcgtgtttgaaaagtcgttaggacagggcctggtacgggaaccgctgaatgagtgttactcagctcagagtttacttctgtacatcttgcccagatctggggtgattctgcctggggttaggacagggttggggtgttagtttgactgtagccccttgggtgcttcagcttgtgaagtcaggatgaacaggtgtaaccagccccaggcctgctgtcttgctacttctgttgtggccacaactccctttgccctcagaccctctcatttttgggagaaggcagggtgagatgggggcagatgctccaatggactccacttatggccttgggaaagctgggccagctcatgggaccatgtcaaaagacggtaggtttcatgtccaactctggaactggatgggacaatcacagggtagctagaaggcaaaactggagagcagcgaggggaatcgaggggacctgcttcccgaggagcagctagaatacttggttattattaccaatgcagctgcaggacctggtccacttctacaagcccgtgactgttcccaggcttctgtcacgcaccagcattcacctgtcagggctgccgtaggtgggcttgcattttgtgcattgtaccaaggtgcccagctgagggttgagaggacctgaaatgcagtccacactcagctctccaacctaagagtcctggagcaaaagaccccttctgctatgttcttggggctaggtctgcccggagtggcccatttttccagtcccaccaaagccctggaatagtgtagtggcacctagctacctgaacttgtgagcacgtatctatagtcgactgagttgccactataccctggagtgccccctctctgggcttcctcctggccctcatacccacctcctactcttacctacgtgcaggtcctagggctggctgggagtccgagaggggaatgccctggtaactgaacaggctcacccttgagtgtggcctaaggcggtttcctgcctcatcccagggggctcattagatgttcctggcagtgtgcccatcctgggcaggctcgtggtgaccatgggacgccgggcccagggccctagtgccctcccttgcatgcatcttaggagaaagagtcatggaactggatattacacacccctctttcctcctgccactcactcctctactgaattcccacccatgccccgtaaggacccagatgcctagggacagtggggctatgtctgtggtttaaaacaaaatcccttgaagtggagcgtccagcttgccctgcatctggggtccttcatagggaaccctaattattgttgatgaacagcacattcctggggtgcttaagatgcagggagccgatttgtggcctcgcccagtggccagtagggagaggaggatgaggggacagccactgggggctccacagtcagctggaaatctctgaaaggaacacttcaaagaagtgtgtggaatttgggttctcttgcgttggaactaccatgcagagctccaggaccaaagcctcggtcaggagcaggagtggtgctgagtagaaacaatggcgcccagtgcttcccagcctggccacgtggggagaaacaaaacacgcctcctctcatggccctccaaagtctttttgggccaccttatttggacacttaatgggagttattattattgttattttgagatggagtttcgctctgtctcccaggctggagtacagtgatgccatctccgctcactgcagcctccacctcccaagttcaagtgattctcctgcctcagcctctcgagcagctgagactacaggtgcccgccaccatgcttagctaatttttgtatttttgtagagatgggatttcaccatgttgtccaggctggtctcgaacttctgaccttaggtgatctgcccatcttggcctcccaaagtgctgggattacaggcatgagccaccacatccggccttaaagggagttattaattccctcctgccccagaagtgccgggcgggaaagctctggacgcagtatttctgaagcagattggacagaaatctgcaggcctgcaaactgcagtcaacaaaacgccattgagcagagagaatggagcatttggcacaaatcagctgcttgccctctggccctggaggaggcagccagggtcaaggctgccctgggaagccctgatgctggtcgcttgttgagccctcagcccggttactggcttccctccttgacatggtctcaactggacatgagcctttgtccccagctctgtcctatgggccagcatctctttggctctgcagaggtgagtggaaggcgctctaactgcggatgctcagagcctggctttgtaaagtagcttgccacccttactaactgcacaaccttgggcaagctcctggccttctccaggcccattttcacattagcaagagaggaataatggccatcttcacagtgttctgagaggattacatgaaataatgtatgtaaagtgtttggcatggtgcctggcacatgctgcatccgtagtaaaaaggtagcttctgctctggtgtgctagaaaccccctgccagccttgcttggtgaggttatttgcatccatttttgtgcacactggtggtatgcaggccctctgctaggtgccaagccttgtcaggcttagtgcctgccctggtagaaaagacaaagcaaggcccccaggagctgattggaggtcattaccaggggtcctgcttaattatagcccagttattaagtgctcctgattcagccttttcaaagtcctcctttgcctgaagaacctcctctgcatggggctggaccatgcctctccctgcctgcccttcactggttctgctctgccttcagcacaacccacatccagctggtgttgaaatacctctgtgccaacccaggagagcgctaaacttgcacaacttttggggcatatctggatataccagcatgttcatcctctaggcaagagacagagggtggcacggggcctggagaaaaggctagactcgggtcatgtcatcaatcactccttcctttatcttcttagagcctgttgcctctcactccacccccatgggtgctcaggctggcgcaggactcagggggcctctgatgtggccctccctggggatcggggcaacaggaacaacacaacgcgagactcctgtggtcgaggcctgccttccctcagattagctttttgggaagtctgctcccttggactgcattctccatgcttttccccagctggtttccctgcccctcctcttcacattctgacctccctgtgctggatgtgggacagctatcctgtctgtaagataagataattaaaagcctggtggctctttccctgctgccaccaagtcatgcagagacggaggctcaggctcagttgcgttcaagattcggcttcacccgtaacccactgccatggccgaggaaggcattgctgctggaggggtaatggacattaatgctgctttacaagagctgttgaagacagccctcatccacgatggcctagcacatggaattcgcaaagctaccaaagccttagacaagcgccaagcccatctttgtgtgcttgcatccaacggtgatgagactgtgtatgtcaagttggtggaagccctttgtgctgagcaccaaatcaacctaattaaggttgatgacaaaagaaactgggggaatgggtaggtctctgtcaaattgacagagaggggaaaccccgtaaagtggttggttgcagttgtatagtagttaaggactatggcaaggagtctcaggccaagcatgtcatcagagagaacttctaatgcaagaaatgaagaaaatatctttggctcacaaaaaaaacaaaaaaagcctggtgcccacagcggctctatacttattagctcaccatcgaccctcttctgggcactgaatactggaacactaaggggtggctcctgccctgtggcagagatggtcacagaagagtagagtggctacagagtgatacacagaggtggagtgttctgtccagctgctagagttctgcctcccaggcctgtgatctgacttgttgtgcatggaagctctattctgcactcctggatccatctggaagcccatcctgtagtcttaacaggcttccgagaggtggggggcctgtggcgagggggtttcagtggggatggtaggtaggagacagaagccatcattttaccatactcctaaagaggagccaaattagccaactcgtgtcctcttttttggcatcttttggcccatcctctaggaagggggccaactggaagagcaaataaaagcggccattgcggtgcactccctgtgtgccaggcactgctgttggatgtggaagtgcattgctttatctcatgcagatgaggaaaccaaagctcagtgaagctaactcattatcaaggtcatgcagctatagaagagtttgggaccaagccttgggccacagttctcgattcagcaaccacattctttccattagaacagctgcctcctgcttcacctgtgaatcgtacaaaagcagcaagatgacccggctcagcccttgaataattgcaggttatatttttccatctgttaaagaaatctgttgaggtcagtctctggacggggcaggggatccagccgaggcccctggttgcatggccatagttgggaagagggcagagctggcagacatgtggcacacaggagactgaggcacacatctcagacagaagtttgcaaactgaagggtagtgggccacagccagcctggagatacattttgtttgacttccaagttctttagaaaaattttaattaggccaggtgcggtggctcacgcctataatcccagcactttgggaggccgaggcgggtggaccacttgaggtcaggagtttcgagaccagcctggccaacgtggtgaaaccccatctctactaaaaatagaaaaattaactgggcatggtggcaggcacctgtaatcccagctactcaggaggctaagggaggagaatcacttgaacctgggagacaggggttgcagtgagccgagatcatgccattgcactccagcctggaagacaagagcaaaactccatctcaaaaaaaaaaaaagaaagaaaaattttaattagttgctgatatttaaaacttaggaaattttacataaaaatctaggtttccagcttttctgaaggtctggtaaggttggacccccattccgtgtagcagcacgtgtctggggcctaagtcttgcgtgtgaaaaagggctagagtaaaagtagaaggcaagaagcaaggggaggagtagggagcatggggagaacccatcttgattattgatggtcactgacccctaatctttgcagagctttgcactgccacgtactgtgtttatttagtcttctcagcaatcctgcaaggcagccctctcaggactgagaatttgttcggggttgcacagtgggtcagtgatcaagtgaggattcacacacatgtcttgtgccccttccagtccgtgaagcttgtttcttgtctccctaccatactttcagctgtcatacttccacctgtcatacttaattctttttttctttttcttttttttttttgagatggggtctcactctgtcacccaggctgcagtggtgagatcttggctcactgcaacctccacctcccaggcttaagcgatcttcccacctcagcctcctgagtagctgggacctcaggcatatgccaccatgcccagctaatttttgcattcttggtagagacagggtttcatcatgttgcccaggctggtctcgagctcctgtcagctgttatacttctatgtgttcagtgcttttgggaggggtcagagtggtagcagtgcttctcagacacacttttgtgagtgtgatgcttcaggacctccacgttgccccatttttatctggggcccctctctgggctggagcactctcactgggactgtgtcattcatttgtttagtcaacaaacatttatggaacaactgctgggagctcacctgaccagttgatacaaatatgaataagacatggtcttgatcttgaagatgctgtcagcttggtggaaaagaagagcacaaagaccgggcgcggtggctcacacctgtaatcccaacactttgggaggccgaggcaggcggatcagctgaggtcaggagttcaagaccagcctggccaacatggtgaaaccccatctctactaaaaaaatatatatatatatacaaaaattagccgggcatgatggcgggtgcctgtaattccggctactcaggaggctgaggctgaggcggaagaatcgcttgaacccaaggttcaaggttgcagtgagccaagatcatgccattgcactctagcctgggcgacagagcaagactgtcttaaaaaaaaaagagagaagagcgcagaaagaccctcctcatcatcatcaaacatcaaacattgccatcatccgacagtgtcaccagtgcactacaagacgtgtgaacaggaaatgatgggcatacggagaagggcccttgcccagccggggatccaggaaggcctcctggaggaggtggaactgagccaagtctcaaaggatgagtgtgagttagtcaaaaggaaagccttctgggtggaggggacttcctgaacagaccggagatgagagaattgggcccttgagttgcagttccatgtcacttggtcgaaccaagaggtgggtgggtggcaagcactagcaagttaggagcttggacgacggggtgctattgaagtttttaggcagaacagtgacggctcccagagagccctctggctgcagcatagcagctggcctggagatgggaggctggttgggaggctgctgtgatggtggcctaggtgagagaggatggtgccaggctcaggactgcggtagtggggatggtgaggggaatggatttggaaaatattgagagaaaattggcaggatttgattatagactggacttctgaggaaggaggatggtgagacacccaggtgagtggtgccacacacaaacacaaaatgccaagccagggagtgggactggaagggggcggtgaggtggtgggaggcacccacagaggcccttctgcactgtggggtctggtgtgttggaggaagatctgcacttggatgaggagatttggggatcgccagcatccgcgtcattgaagtgatgagcatggacgtgtgacccaggggcttgaacggagttaagaagagcagggccaggagcagacagacctagagagcaagaacattcaggagcaaagcctgaggcaggagggtggtcatcaacacagatgctgcagccaggtggcccagggtcgggcggcatccccaccactcctcccggggatgacttgcacctgaaacagaggtaataaaacacagcagccttgtgaggatgacatgacttaatccgtttaaagggctgagaaagtgctcacatactttagctctttgagggctagaggcccagaaggcatgtgagggagacacggagtgatgcttgagactgggggcacaggtacctagaggacggggtggcgtggcccgtgtctggggtctgtcagcgaggcgatccctgggctcttggcagggctggcactgctgaacgtggggctggctgaggcccaacttctgtggaggagtgagtggaaggtgagaggcagagatggcatggggtggctgttctctttgggagcttgtctaaggcaggtggagggaggcacaaaagtttctagaatggacattggaacaaaaactgctttctgacaggtagagttggtgacataggatttggtctctgaggagatggggtgggaagttgaggttgtttatgcctgatgaccccgatttccttggaagaagtggagacatctataaaagcaggaaggcagacccagggcagaggccctagaagccgggttgttagaggggagccagcccctgagcagagggactgagcgtgtccctgtgtagacctgtgagcaggcaggcggcaggcaggctcctaaggtgacggcagtggtctgtgcacccatggcacaggccctaggtcgggactgggactgcctgggggttctggcagaggctcttcgtctgcccacttggggctgtagcaatggctttccggggcatgccccaggagcacagatgctgtgaggccaggttcccttgccctcgttgccactttcttggtgacctcagtccatgggaggacccttggcacacaatacccccaacctctgcccagagtccctggtcagggactcgactctggcactgggctggtgtcagcagaatgtggccccctcctccatgctccatgaggaagaagtggctgccctgcccaacacgggccgtgtggaggaaggaagtgcacccaggttggcagtgtgtcccagtttcctgctgactgtggccccgtcagcactcctgccctggaggtggggctgctgctggggtaagtgggtccaaggttctggtgacttatcgtgacatccctggggacgaagggctacaacagcctttcaggaggctctctggggacttgtcccgcccagacccctctctgagagtgggggaggccactggctgcctccttgcattggaggccccttccccaccgactccacagggaagctggtgttttctggcctgatcctgctggggcctgtagagggtgggatgttagggccaggtcagcgtcttgctgccgtgcccggagccacagtagagagaaaggtggggtggggttctgagtcacagcgctgctgcagctagctggctggcctggggtggggactaaccagggtggggatggtgctgagccctattcctgtctcaccccagagagctccaggcttccggctgagtcacagggaaggaggacccttacatggggctgagggctgagtattcccacatcacttcctactcagaaccccacttcctactcagaaccccacttcctggggtggggagtggggaccctgcaggtgactcttatgtgcccattccatgtgccgtctccctccagggagggacagggcagccccagaccagccccggtctgcctttttgaaggatgatctgcctagtgggatgcactggccttggtgaagcccctggctgaagcctgtcggggtggagggagagggttcaccctgaatgggaaaaccggccgcagcctcggcgtgccctgctttcttcatactggactaacccactggatagatggatttagaggatgtccgagcagcacaggcagcccaggagagcgagcgagacactctttgacacaagggagagcataaaagcttaagactgaccccaaggtgcgccagcccctcgcaggaagtaaagtgcagaaacacctccacccctgcacaaagagcacctaggagtgagtgcgcaagcgtggacaagccctgcggtaccgtgtacacacacacacacacacacacaccacaggcaagctcaggcagggtccttcacagacgtctgcagtcactctggaggtgacccaagcacctgggcccttagacagtaacaccactcacaccgagcacagaccagctcgcgcccacaacacgagcctgtgacacgcaagtctctgtttctgagctgatgccgtctggctttggccatgagaccctcgtgtgaccaggtgcgtgcctaagttagaatcgcccaggctaagttcgtgaaccccctggatgagggaggcccgactcccgcaaggagccctgcccttctgccagctctcaccgggccggattttcctgcggggcttttggattttgtttttgagtcactcattgagtgttggtcgcgtgccagacaccatgccacactgcaaaccatgtgcaacgttgttttagcaaagctgtctcagtaaatgtgggttattatgtatattattatttacatacgtaatctcattttttctaataacaaccccatgaggcaaagtgttattattttccccattttacagataaggaaaacggggctttgagaggttaagtggcgtgtcctggtggcacacagccagtaagtggtagaggatggctttgaacccaggtctctaactctactctgcacaccatggctttcagtctgactctcagggcagagagatgaggcaagtgtggaagggaagccccagaaggggaaagcctggttaaggggcccttcacccccctctccaaggcacattcccctttctgtccctttgtcgtttcattcactctactcccagcatggctggagggcttgtggctggctcgtttggaggcctgggctgaaccagggactggctggtctataggtttcccctccagccggctgcactctgtagtgcccgaggcaggtttccaccccttctcccaggcgtaagtgggattgagttgccacctgggactgaggcttatctctgactcttggcatttctttgtctggacagattccaagggcggtctgctgcccagacttacagggcctgcccaggtggaaacgctcttttgcaggtagataagcacgggcaaccagcttatctgaaccagcccttgcttccagagaactatggaaaaatccaaaagataagaagggaccgcagtgtctgtcttggtctcactcctcttgagactcctgtgatctttatatgtctcattcctcccgtgacatgtatgagaaactgcagctcattgagacgatgtctctgctgcctgacagaagggcctacttgagggccgggctcggtggctcagccacctgacccccgtcatcctgttaactagtgtcacccccacccgagggcttccttccccatttgctgccaggtgtaaagctgagcttcggctgggcgcggtggctcaggcctataatcccagcactttgggaggctgaggcaggcggatcacctgaagtcaggagtacgagagaccagcctggccaacatgatgaaaccctgactttactgaaaatacaaaaattagctgggcatggtggcaggcacctgtaatcccagcttcttgggaggctgaggcaggagaatcgcttgaacctgagaggtgtaggttgcaccattgcactccagcctgggcaacaagagagaaactccgtctcaaaaaaaaaaaaaaaaaagggctgagctgctgggcgtggtggctcacgcctgtaatcccagcactttgggaggccgaggcgggtggatcacatgaggtcaggagttcaagaccagcctgaccaacatggagaaaccccgtctctactaaaaatactttgccgggcgtggtgacatatgcctgtaatcccagctactcaggaggctgaggcaggagaatcgcttgaacctgggaggcggaggttgcggtgagccaagattgtgctattgcactccagcctgggcaacaacagcaaaacaccatctcaaaaaaaaaaaaaaaaaaaaaggctgagcttcccccaaatggctgatatgtgttcctccttatggacattgaggatggagtagcttcatttcccatttttctttggccaccaggaggcccagcactaaaggctcagcccttctctaccagctgtgcgaagactcattgacctactcgtgaatttttacttccttgctgatggagatgtttttcttcagatttgggttttctctgctcctgattttaatgtttatatttcactactttcttttcttcatgtctccccaccctttatggaaccaggctgggggtatgtaaaaacactccacaggtaaacacacatgaagtcatcttcacagctgcttgattgggcgtgttgcactttttgcttcctcagcttcgtgagactgtttgtgtggtcataacccactggtccgctacaacgtgcctgagggtggtcagggtgctgctctttgcttgtttttgtgttctcatcagctgcttagaattttaaaaataatttctctccaaaccctttagttacccaaagcataaacagtaccctggtgggtaagtgtgtgtgtgtttctttttttttttctttgatttatatatttcacattatataaggataacctgcttattagagaatctaaaaatgataacaagtaaaaaagaaaagaaagctacctgtaattctaccagggagcccatgttttagtgttttgtgatacatccttctggatttttttcctatgcttatatttttcccacaaaaaatagaatttgaccatacatactaaatataacctgaattttcacttcatggtagataattcgtgtctttccttgttgttattctgcaaaaacaaaagctacttaaaatgtgtaccaaggtctgggcgcagtggcccacacctgtaatcccagcacttcgggaggctgaggcaggcggattgcttgaagccaggagttcgagaccagcctggccaacatggcaaaaccctgtctctactaaaaatacaaaagttagccgggcatggtggcacatgcctgtaatcccagctactcgggaggctgaggcagaagaattgctcgaacctggaaggcggaggttgcggtgagccgagatcatgccagtgcactcctgcctgggcaacagagtgagactcagtctcaaaaaataaataaaatttgtatcaaggatacatgcacgtatatatatatttttaagtatagaagggcttattataaaaagcaaaaacgtctgtcctccctcaccccaggccaatttaaaagggacttttaatcatttagggttcttagggttcttgttctaccattatttcctccattttttttttttctttttgagatggagtttcactcttgttgcccaggctggagtgcaatggtgtgatctcagctcaccgcaacctctgcatcccaggttcaagcgattctcctgcctcagcctcccgagtagctgggattacaggcatgtgctactacgcctggctaattttatatttttagtagagacgggatctctccatgttggtcaggctggtctcgaactcaggtgatccacaccaaagtgctgggattataggtgtgagccaccacgcccagcccatttcctccatatttttaagtaaaatacttacaccactatttcttggcttatttgaattcctaactttccctcacttacatctcccttccattcctccccccaacatattctgtcaccgtactgtattcacttcctttattggttacctttgcaatataaaacagtacacttgacctgtatttattattccattagccattggcagcagcttgtgacaaccctgctaccatattatgatgtctgtctgtcatcagttctggtttctgaggtcaaaattgaaaacactcccattctgtgtaataaccatcagtctcaaagaccagtgcttttttgggaggctgacgcgggcagatcacttgagttcaggagtttgagaccagcctggccaacatggtgaaaccccgtctctactaaaaatacaaaaattagctgggtgtgatggtgcatgcctgtaataccagctacttgggaggccgaggcaggagaatcacttgaacctaggaggtggaggttgcagtgagccaagatcatgccactgcactccagcctgggcaacagagcgagacttcgtctcaaaaaaaaaagaaaagcccatgctcaacatttgcattactctgtcaatgcaaatagcattcactgcagggcccacttaacatttccttctctttgggtctaatgtcactcaaaggaaagtgttaaatgtattttcctttcttaatattctattatgtgctcaaaactcatcactttatattttagtttgcttgatattttgaccatgcctttcttgcctgtttttctggagcttctaatacatcattttttttcccagctgtatagtattcagttggattgaggcatcataatttattttgacaaggtcccctctggttggacggactctttggttttcagttttttattaatgtgaagggtgccgtagtaagtatccttgtacatacatctctgcatcatttcttatgtaatgtttgagagtccaggaatgctgctcgcccatcaaacctgatccccctgcccccagccccttgccattgccaccctttgccttgctgattaccttcctttaaaccagtccatctaaaggttggtgttaagaggcttcccatgggaggggtggccccaggtaatacccatcttcctctccccaggctctgaagagcggccattcctcagattcgaagctgaacacatctccaactacacagcccttctgctgagcagggatggcaggaccctgtacgtgggtgctcgagaggccctctttgcactcagtagcaacctcagcttcctgccaggcggggagtaccaggaggtgagagatgttgcctggagctggctaggctgggcagaggaccacagagggaagatggacgggaagcttgaccttctgggtccaaggatgatgcctatgggagaggagggaggctcagcaaaccctccattttgtccactaccttcccctttctcattccccagctgctttggggtgcagacgcagagaagaaacagcagtgcagcttcaagggcaaggacccacaggtgagcccacacctggaagggagctgagctgcaggagggatggagggtggtggacttccatccaggccagaggcgggaggtgggagcagatacagccaggtatggtgggaagggcataagcttctgagattacccggcctgggtttgaatcccagcactacacttacatcgctacgaccttcgacaagtagattcacctgtctaagccttagtgggcccacctgtaaaatggggataatgatccggtctcactgggcttacagtgaggattcaggaagctaataggtgtaaggcacctggctcatagatacaagacctaacaagtcagcttccagcgtgaacagagattgggtggggtgagagttgtgtccctctgcagatggttcctgatgtagcacatctgacagattctggtgtggttttggccaaagcacaggatgaaatctggttcaacccaggttctcctggaggactcatcatcatccctagaggcctcctgctcctgctcctaagtgcagcaggtgctgggtaaggtgagggcaaacgagtgctggacttgggatcaagacacaggttcaagtcctggctgccattctgttattcagctaacattgatgaagcatgcactctgtgtccatgtacttttaggtactggagatttaattgtgaaaaagcaggcttggcacagtggctcacgcctgtaatcccagcacttcgggaggctgaggcaggtggatcacaaggtctccacctcatggtctcctgagtgtctcaggagttcgagaccagccaggccaacatagtgaaactccgtctctactaaaaatacaaaaaacattagccaggcatggtggcaggcgcctgtagccccagctacctgggaggctgaagcaggagaatcgcttgaacctgggaggcagaggttgcagtgagccgagatctcgccactgcactccagcctggatgacagaatgagactgtgtttcaaaagaaaaagtagtcagtttacaaatgttattggcggggcgtgggatggaatgaggtggtcaggtaacatttcattaaaaaagtgacatttgagccaagatcaggagagagtgaggagctgacagtggcatatctggaggaggggcaggacttttgatttcactctgagggaggtatttgggaggccaggggaaggctgagcagagatgtgacatggtctcacctgtgtactaagagggtcactctggctactgtggtagagaagcctccatggggaaggacaggaggagggagagcagtgaggggcgagtgatgatggtggctcggaccagtgagaaatgctcagattccggatgcattttgaagatggagccaccaggatttctgggtgggaaattatggggtatgaccgacaagaagagtcaaggctgactgggtttggggcctcagcgactgaaaagacagaattaatgaaagtggcaagatctcggggggaagcatgtgttttagggaggaccagaaagaagcttggttgcaggtgccagttagataccccatttgaaggtgatgcatgaatctggggttcagggttcagggctgagcagtcctcctgctctgggctgtggcttcatcagctcccagcttggttgggaggggcctgtggcttctgaagaggatgctgctggggaatagtacaactcaaaggggtaggattctgtgccctcacccctaggccgaaggaaagtttgccagtcacaaaactagctgagcccctgggctccctgcagcacacacactctgtgcacgctccactgtgccccagaaaacccgtgggttctttgttcctagacttgagtgccccatccccagtcctgggagcagaggccgggcctgggtgtggaagggggggctcggcggtgccccctggtggcatgcttgggcgtgggactgatatcccctcgctccttccccccagcgcgactgtcaaaactacatcaagatcctcctgccgctcagcggcagtcacctgttcacctgtggcacagcagccttcagccccatgtgtacctacatcgtgagtgacctgtcctcagccctgaggctgacctgggaactgcccctctttctgccccagggatcctgttctgtagcatagacccctgaggaaaggcagggcccagagggaggtttctaggtaccactggcctccaagagccctgaggtcccacaccctggcacaaagcgcagccctgacagccatgtctccctgtgcggggaggcgggggcacatgcggtcacttacccatgaagatcctgtgccacccaggccttgctgccctcttctgcttcttccagcatctctccctctcctttgcttgattctcttgtcttatcttgtacaccccctcctcagcacacacccctagcagagggtggcatttgatgctgtgggttggagcccagctttggggtcagacacacctgggtttgaatcacattgctgccccttccaggctcacatcattttatttcttttttctttttcttttcttttttttttttttttttgagatggagtctcgctctgtcgcccaggctggagtgcagtggcacgatctcggctcactgcaagctctgcctcctgggttcacgccattctcctgcctcagcctcccgagtagctgggactacaggtgcccgccaccacgcctggctaattttttctatttttcggtagagaggggggtttcaccgtgttagccaggatggtcttgatctcctgacctcgtgatccacccgcctcggcctcccagagtgctgggattacaggtgtgagccaccgcgcccggccaggctcacatcattttctaagcctcacctcctccgccaggtgggtctgataatgtgtcccgcgtcgggtcactgtgaggcagtgtggcactgtgtctgggtgaggcctctcctgaggccgactgtccaggttcaaacccttcggcaccgtgtcctggctgaggaggacggcgtccctgacacctgaccccttctgtcccacacacctcacctgcctgcagagttgccttctcctgcacgcctctctctttctcaccaagcctgctcctcattccctggagtgcccctgagcccatgtgtccaccctcctgcagaacatggagaacttcaccctggcaagggacgagaaggggaatgtcctcctggaagatggcaagggccgttgtcccttcgacccgaatttcaagtccactgccctggtggttggtgagtgttgagggcaggatggcttcattgaggttccatgtaggggcacacagggctagagggctagctttggacaggctgagtccatgccatgcttatttccaaggggacagaatggccaggggcttgccttgggtttggtttttccaagttccagcttccttctctgcccaccacaggcaaaacgggcagtgctggggtcactctgggccctgagcagggagaaggggccgtgctgaggagcccattcccatgggaatgttttcttggcagatggcgagctctacactggaacagtcagcagcttccaagggaatgacccggccatctcgcggagccaaagccttcgccccaccaagaccgagagctccctcaactggctgcaaggtgaagtcctcttgccaccacccagagggcagggatcctgttcacccagccctagaagggggcactttcccccagcttggcctgtctccagggttcctgggctgactctgagctcctgacctggtccctacagacccagcttttgtggcctcagcctacattcctgagagcctgggcagcttgcaaggcgatgatgacaagatctactttttcttcagcgagactggccaggaatttgagttctttgagaacaccattgtgtcccgcattgcccgcatctgcaaggtgaggggaacgggctgacagggtggccaccccagggacctcaaagcctccacagctgcaagatcacccacatccatgcatggcctttcccatcccgccaaggagtacagcttggctaacagcttttctctctcaccttttaaattaaaatatcttactacttttttcttttttttttttctttttatttttagacaggatctttgctctgtcacccaggctggagtgcagtggcacgatcacggttcactgcagcctcgacctcctgggctcaagcagttctcctacctcagcctcccgagtagctgagactacaggtgtgcgcccccatgcccagctaatttttgtattttttgtagagatggggttttaccacgttgcctgggctggtctcaaactcctgggctcaaacaatccacccacctcggcttcccaaagtgctgggattacannnnnnnnnnnnnnnnnnnnnnnnnnnnnnnnnnnnnnnnnnnnnnnnnnnnnnnnnnnnnnnnnnnnnnnnnnnnnnnnnnnnnnnnnnnnnnnnnnnnnnnnnnnnnnnnnnnnnnnnnnnnnnnnnnnnnnnnnnnnnnnnnnnnnnnnnnnnnnnnnnnnnnnnnnnnnnnnnnnnnnnnnnnnnnnnnnnnnncctgtaatcctagctactcaggaggctgtggcaagagaatcgcttgaacctgggaggtggaggttgcagtgagccgagatggtgccactgcactccagcctgggtgacagagcaagactgtctcaaaaaaaaaaatgtgaaaatagaaaactgtacacacaaaaatcacttacaagttaaagaggcactgtagcatcagctggagagcacagaccctggaggccaactgcccaagttcaaaccctgctggcctaggatcttgggcaagtccctcaccccctcggttaacagtttcctcttctgttaaataggaagaataacactgacctcagagttgttatgtgaattattaatccacgcaaagctcttagaaatgtggtgggcagtgactaaatgtgaactatgaatgttattaccccaccaccccagcacaagaaggagtcactggtatcattttagaatgccccctccaaatctttttttttttttttggcatatgtgtaactctgtgtatatatatatatacatttttttttttcctttttgagacagggtctcactttgtcatccaggctggtgtgcagcggtgagatttcactgcaacctccgctgcccaatctcaagcaatcctctcacctcagcccctcatgtagctgggactaccagcatgcaccaccatgcccagctaatttttttgtatttttagcagagacagggtctcaaactcctgagctcaagtgatccacccgccttggcctcccaaagtgctggaattataggcattaataatataagtaccatcccgaccttgtacttatattattaactcactcaggaacatggcattaggctatattggggtcctttggcttccttgtttgctcagcagtgaatcgcgtccatatttaggaaggctctgcttagttacagtaaggaccatcctcctgatggatgcgtacactgctcttcctgactttagatggaacttggtcctggccttctcctgcccttcagtcctggtgtctggggtgggtccattgaggcagtcctgtgccgtgcatccccgtcatggctcagcgtgtgcctaagcccagcccatccgactctccctccagggcgatgagggtggagagcgggtgctacagcagcgctggacctccttcctcaaggcccagctgctgtgctcacggcccgacgatggcttccccttcaacgtgctgcaggatgtcttcacgctgagccccagcccccaggactggcgtgacacccttttctatggggtcttcacttcccagtggtagggcctccagacctcgctggagatggaagggtgaagggtggctgggactggggcccccagggctcctgggttaatctggttatttcctctgcaggcacaggggaactacagaaggctctgccgtctgtgtcttcacaatgaaggatgtgcagagagtcttcagcggcctctacaaggaggtgaaccgtgagacacagcagtggtacaccgtgacccacccggtgcccacaccccggcctggagcggtgggtactggctccctgcacccagaaggggtgccgggaagatgtgggtccccacaccatgctgggagcaaggctgcctagcctcgggcagatcacttggcttctctgaatctcttttctcatctttaatatggggatataggcccaggcctgcttgtgtactgggttagatataagtatgaatgtcagaatatcttcagttctgtttcaggatacaagtgtgtccccatcagggcacttgctgcaggctgttacaatcatctcttcatttggtcctctcccctactcagctgcaagctccttatttaattatcaagtgactgaatgggcaagctgtggggaaataatcctttcttcctcccttctagcctaacgggctaccctgatagcagaccttgagacaaggatatacgtgccaaatagtttattagggaggtgatgccaggaagcagcatgaaggaataggaaggttgagaggaggagggagggaaaccaaaagagggtgtgtcagcacgctgttgttgctgtgggcagctggagctgggtcctgctggagcccctgacagatggtgtggagcacctctcagaatttcaggaagcctcaggcggggcaggaaagaactgccgactgcactgggacgctctgcccggccagggcttcctgagagcactggtgaagggtgcagaggagcagggagtgtggtcctggttcttgaggcccctgggcatatgaggctggggtggtgggcagggaggaggcacagcaaggaagccctccaagcactcggtttccccgcaccctgggctttgtccttgctccctcagatgtgcacactggctctgtagagcactgccagggatgtgccctggctccgggcggggggacagacaccgctactgtccactggggaagcagggcccgcatcctgcctgccgccccgaggtgtggctggcctcacactgctgctttctcctccagtgcatcaccaacagtgcccgggaaaggaagatcaactcatccctgcagctcccagaccgcgtgctgaacttcctcaaggaccacttcctgatggacgggcaggtccgaagccgcatgctgctgctgcagccccaggctcgctaccagcgcgtggctgtacaccgcgtccctggcctgcaccacacctacgatgtcctcttcctgggcactggtaagtgtctgcagcccagcaggctcaggggaaggggtgcacgtggctggtgggtcatgggcagtgggctccacccagggcctgagtcctgtccacaccccaggtgacggccggctccacaaggcagtgagcgtgggcccccgggtgcacatcattgaggagctgcagatcttctcatcgggacagcccgtgcagaatctgctcctggacacccacagggtgagcaggccaacgaggaatcctggcagggtacttggggggtgccctccattagcaccaagcagtccccacccagcttctcctcccttgcctcaggaggatggaaagataaaggatccagtcatgaactattagaaagtggggtcgcctgttacgtaacaggcctcttgggggtggctctgggaggcatacaagccgggtggccatgggtgatggccctggctgcccatgcccgcttctcatccccgtgtctggctgtgcaggggctgctgtatgcggcctcacactcgggcgtagtccaggtgcccatggccaactgcagcctgtacaggagctgtggggactgcctcctcgcccgggacccctactgtgcttggagcggctccagctgcaagcacgtcagcctctaccagcctcagctggccaccaggtgagcactcccaaaggccccttcccatctgtccagccctgcacaggtgacctcggagcaccatcctgggccctccttgggaccgccacacagcctcgtttatgtccactgtctcagcataattattaattagctctcctgcttcctctcaagtgcaattcagacaggaaattgtgtgtttatcttggctacctgtaaaacgaggacatgatttggtaaagtatgaaatagcacagctttgaaaagccttgcaggaaaatgtggattagcgtgtgaacgtgctttagtaatagtagggctaggaaacagtccattaacaaacccagtaaaaattggtttcagaataacctatttggattataaaatgttcatttagaaaatagggatgaacacaaagcaaaactacccctcatcccaccacctagagagaatcgcagtgagattttgatatattatcctctcaggttttactacatatgtgtatagataacaaaaatccttttattttatttcatttcatttcatttatcttgttttgagactcgctctgtcgcccaggctggagtgcagtggcacaatctcggttcactgcaacctccacgtcctgggttcaagcgattctcctgcctcagcctcccaagtagcagggattacaggtgcccgccaccatgcccagctaatttttgtatttatagtggaggcagggtttcaccatgttggccaggctggtctcgaacttctgacctcagatgatccacccaccttgggctcccagagtgccgggattacagccatgagccaccgcgtctggccaaacattcatatattttatataacattggcaactgtcctgtttgtagtgttcttgcttcacatatggatacacctggtgtcagtttttacaaaaaccaagtgagttttggtgcgtatgccaggagggacaccccagaatgttaactgtcatgatcactggctggtagatgctgtgatttttgtagtgttttcatccttcgtgcctggttgacttatctgtctcctgagtgtatccagaattactgtcctttattttttattacacagatgtatgcatgtgcactgtttaaaaaaaaagatgagaacacatcaaaaaaaattttaattaaaaaaaagaaaaagagagatctatacatacagatcccagctgtccttctaatctttttctgagggtacatactattttttattattattttttgagacagggtctctctgtgttgctcaggctggagtgtagtggtgtgattacagctcactgcagccttggcctcctgggctcaagcaatcgatcctccaacctcagcctcctgagcaggtggaaccacaggcgtgcgccaccatgcctggctaatttttctattttttgtagagatggggtctcgctatgttgcccaggttgtcttgaattcctgggctcaagcgatctaccggccttggcctcccaaagtgctgggattacaggcgtgggccaccatgcctggccactgagggtacatactgtttatgtaattaagggaagtgttatcttagctttgacttgaaataatgtgtagacagaggagatgctgactcctgtgggtggggaatcagctcaggaaaggcccttgcccaggcccaagtctgcagtgaggggtgagggaatgtgagctcaggggacttcctggccaatcccagaattctctctggccctcaggccgtggatccaggacatcgagggagccagcgccaaggacctttgcagcgcgtcttcggttgtgtccccgtcttttgtaccaacaggtgaggtgccccctcaaaaggtggaggagagaggtggggacaagtgtgcttggaaggctcccccaggcacagatgttgtaaatgcctttcctcacttccttgccccctacccctgtaagcaggtccccaggaagactcagtcccaggggtccccggagttgcccatcgtggcaccaggggcatagaccagagggaggcaggggagcttggagctactgtggacgctggcacccccctaccccatgccttttctgcctacaggggagaagccatgtgagcaagtccagttccagcccaacacagtgaacactttggcctgcccgctcctctccaacctggcgacccgactctggctacgcaacggggcccccgtcaatgcctcggcctcctgccacgtgctacccactggggacctgctgctggtgggcacccaacagctgggggagttccagtgctggtcactagaggagggcttccagcagctggtagccagctactgcccagaggtggtggaggacggggtggcagaccaaacagatgagggtggcagtgtacccgtcattatcagcacatcgcgtgtgagtgcaccagctggtggcaaggccagctggggtgcagacaggtcctactggaaggagttcctggtgatgtgcacgctctttgtgctggccgtgctgctcccagttttattcttgctctaccggcaccggaacagcatgaaagtcttcctgaagcagggggaatgtgccagcgtgcaccccaagacctgccctgtggtgctgccccctgagacccgcccactcaacggcctagggccccctagcaccccgctcgatcaccgagggtaccagtccctgtcagacagccccccgggggcccgagtcttcactgagtcagagaagaggccactcagcatccaagacagcttcgtggaggtatccccagtgtgcccccggccccgggtccgccttggctcggagatccgtgactctgtggtgtgagagctgacttccagaggacgctgccctggcttcaggggctgtgaatgctcggagagggtcaactggacctcccctccgctctgctcttcgtggaacacgaccgtggtgcccggcccttgggagccttggggccagctggcctgctgctctccagtcaagtagcgaagctcctaccacccagacacccaaacagccgtggccccagaggtcctggccaaatatgggggcctgcctaggttggtggaacagtgctccttatgtaaactgagccctttgtttaaaaaacaattccaaatgtgaaactagaatgagagggaagagatagcatggcatgcagcacacacggctgctccagttcatggcctcccaggggtgctggggatgcatccaaagtggttgtctgagacagagttggaaaccctcaccaactggcctcttcaccttccacattatcccgctgccaccggctgccctgtctcactgcagattcaggaccagcttgggctgcgtgcgttctgccttgccagtcagccgaggatgtagttgttgctgccgtcgtcccaccacctcagggaccagagggctaggttggcactgcggccctcaccaggtcctgggctcggacccaactcctggacctttccagcctgtatcaggctgtggccacacgagaggacagcgcgagctcaggagagatttcgtgacaatgtacgcctttccctcagaattcagggaagagactgtcgcctgccttcctccgttgttgcgtgagaacccgtgtgccccttcccaccatatccaccctcgctccatctttgaactcaaacacgaggaactaactgcaccctggtcctctccccagtccccagttcaccctccatccctcaccttcctccactctaagggatatcaacactgcccagcacaggggccctgaatttatgtggtttttatacattttttaataagatgcactttatgtcattttttaataaagtctgaagaattactgtttaatcctggctcttcctcttcaaggacagttgctttttgaggtaggtctagtcttctgagttctgagaggttctgaacctcttctttgcaggctcaagtgagccagagtcagcctagcctggtcagcaacgtctccctgtggggcggctctgaggtggggagcttaacgcactgataggcggaggcagggggttcattgcgtttacctcaaccccttcattctgcatccccaattcagtttagcaagggtagggacacaagggaagggatgggatgggatgggggccctgtattaaagtttttaattcttcagatcatgcagtaaaatagactttactgatgtacggttctttacattttgatgcatgcagagactcatctaaccaccaccccaatcaggatacaggcgagtcccacacctcctgctgccccttcatcctcacaccctcccacggggacagccagcgtgggtgcggcttgacttcccgctggcctctgctcgatatgctgcttattcctaggatgattgaaggctcttagaagagaagtccagtccttcctcataccagtgtatctcatgtcacacatagggtcaaacttctaaacctttattactgattagtacaaacacaaacggagcaatgacaacagcagtgaggagaggccctgacaacgagggccgcccctgcccggggtgaggctgcacagcgccagctccaggctgggccagcttggcccgcactggcaacacaggcttgaccttggccacagctcagcagtagaaaggttcttggacagggtgccaggacacacgctggggctgctgtcacaggacaatcttaaaggagctgaacaagagaaaagcggtgggttttctgctggaagaggagggcagggactaaacccgaacttgcccccttctccctttagacccttctttggaacgggctatgttccgtgtgtcagccccctctgcaagaactccccgagacatccagagggagctttctggacccacacactgggtcagagcttctaaacctttattactaatgagtacaaacacagagcaatgacaatggcagtgggaaggggagaggtcttgacaaggagggctgcccctgcccggggcgagactgccagcttagccggccctgtgtgtggggactggggctttctctcaccctggcaccacctcctgtagccatgccctaggcccagaggcagcaggtcggaacctgcaggtacccagaatgaagggggaccactgtcatacctggcaaagtctggagaacgggagatgacgtgctggaactcagagaggttgatggttccatccctgtcaatgtcagactcctccaggatctgggaaagggagagtttcaggccagagccccaactgctccctcccgctcccaggcctgctcagctgctcacgttgtcgatgagctgcttcatctcagacgcactaagccgtgtgtcctcgccctctcccgtgaggcagttcaccagccggctcaggtcttctctgttcaaggttccgtcatcatcaaagtctagagagcagacacaggaagccaaaagacacggttgggaggggctctgaggttccccaaacggcgcccatttcccaagcagggccaccacaaagcccacgtgggaaggggtggtgtcctgccgggctgctcctggttctcaccaaagatgcggaaggcataatgggacttgatgtctggcgtggctgtgtcactgaacacactgaggagatccaggaagtcctcaaagctaaggctgtctttggctggggatgtggagaagaccctgcagattcgctccttgaaggggttggcctaggagaacaaacgccacaggacgtggcccaggtcacacgctcattaaagcctaccagaaacttgagagagcaggtcacaggaccagcaccagcgagctcagcctcgtgggggtgaacagtcagtgctttggggccaacatggagggcagtgggggcacaggaaagcaaactgacccagctggggaagggactgagatggcttcctgggagtcaagtgtttaacccaaaggcaggtcacatacaacataagtgtgggcagagagggaagaagaagtcatcctaaacaaagggaacgagatgggctggttattttaaaacacaaatatttacttgaacagctattgtgttacaggcaccgggccaggccctttgcacagaaattttgcagcagccttacggagtggcaatcagcctctagaacacggttcctcaaactctaatgaggtacctcaactcctcttaagggacaaaacttctttgaacttccaagattatgttctagaatccccatttgaaaagcaccattctagataattctgccaggtgattttggtaaagtccttgcccctagaaaatcagaactaagcagaaaaatgaccagagtggggaccagtgaccccatgatcccaaagctagtggcagatggagttagggggtctagcagggagggagtggtgggagaggtgtcaaaggaggggagcgcttgcaccttgagctctggaaggctgagaatctgctcgaagggcacttgtgcccgaagtgacgactccacgctccgctgctcctggggaagcagctcacaaaaccgcctgtgggctctggtagagagaggggaactgtcggtgttctcagcgatcggtctccctgtgtgttcattcccactccttgcctgctgctcattgtcaaccaggtgaggagctaaaaccacgtacacagaacttccgagtcatcaggcaacggtaagcaaaaggacatgtcacaaggcagtacagcctaggagtctattcttgcaatgagtatttactgagcatttactatgtgcttggcactgattctagagatccccaagggatgaagaagttgggaaaggagccagaagttggccctaaagaattggccaggcacggtggctcacacctgtaatcccagcactttgggaggccaaggcgggcggagctttggaggtcaggcgtctgagaccagtctgagcaacatggtgaaccccttctctactaaaaatacaaaaattagccgggcatggtggcgggtgcctataatcccagctactcaggaggctgaggcaggagaatcacttgaacccggaggcaggagaatcacttgaacccggaggcagagcctgcagtgagccaagatcgtgccccagcactccagcctgggcgacagagcgagacgctgtctcaaaaaaaaaaaaacggagaaaagagcaaaaccaaaaatctcattctcaccttcactccagggatctcttaccctcaaagcctcctttttagcaaccacactgaactgtcctcctcggcctccacctccttcccatgagcttatctttgccacaggaacctggcctgcataaatccggcaaaagggcttccagcccaagttcaaatctacttactcagagtgttgtcttaagcagttaccaaacctttctgaacctgtttcattgtccagtacctctctcctaaagattaaattaggtaacgcaggcaaccatttagcacagtccctggcacatggtgagtgctcagaaagcgataacggttactgtattattcaggtaaagttgggagaaggagccgggctccccaaggcttctgtggtttagccactgggcaaggtcggcccctgccggactggggcaggaagttcggcagtgctgaagctagtggagcccagggtcaaagagcgcctaacttttcctggaggctgtaaggtggctccgcggtgccacgctggggcctcaggcgagggcggggagggcgtgccgggaggagggcgcagcccgggctaggtctcccggcctccagctcccgctcctctgcagacctcaggccagcccccgcccctccctcgggacagcgcccccgaagctgtctctagaggatcccggggtcggaggcagggttcaaggcagcacttacaggaggatctcctgcttcgtcaggaacgtcaagtcctggaaggcaaagccagagcggggattagcggaccgctgggaggccgcggccgccccgcagccagctcccggaccctgctcccgagaagaggcccgcacgcgagctccccagggccaggcgtcccgcgcacctggtactcggccagcagctccttggacaggcgactgcccgagccccccatcgccccgccgcgcgcacagctccgccaactcgcctcgagacgcagacaactttctcacttccgcccttgggccgcgtcactgcccggtccccgcggcaaccgctcctggggccaccacccccgggcccgccccctcctaaaagctgccaggcgttcccagccgggtttggcaggcgagctgccggctccaagcggtcctaggcgagctggaggcggggcccggggaggggcccgacgctccggggcggagcccgggactcacggccccgcctccggggtgggaggggggggcgggccacgccgcgcgcgtgcgtgctggctgcgtatgcgtcacgggcgtcatgacctcgctgtggccccggcagcggctgcggggaaagtcgcgaggtgcatccgcttcggctgcagtaggtggtggcggcggcagccctgggtggggtcccataggggcatctgagaagtcactggagctagcgtttccgggaaacctggagactcgctgagtggcgggggtcgtcggctgcccctctgcccagcaagggcttttctagatgttatcatcaggcaatcgctgcacctgtcgcagcccccaagccacctcttccagaagtaaccataaccttgcttccttcttaggctatttactgaggacccactggatgtcaagcattgtgcatagttttcttcgattgttgcaacatcccttgcgaggtaggttcccattttacaaagatggaaatacgtaagtccaaagggtgttagtgatttttccgggcgccggcatttagaaggtaatcggtccagtccaaggcacttttaaaggctctccactgctgttctcatcattccagctgacctgccgtccttttgactccatctcacccctagactgctgaccctttgctcttgtcccctcttaacctctaggataatgtttggcacatagtaggctctcagtaaatattatcgaatgcataataaatgaatgaacgtatactattgcaaaaggtaaggattccaaactgctgggaggaggaagtggaggttgtgttggtcaggctgggattaattcttgatccttccaatccattatacttgctgatctttgtaaagtctaaatctgagtatgttagtctcagtttataaccattaaatggttaaaaacccaaatcctggccctctgtaactggacttcctcctattggctctctgtctttcagccactttgggccctcagtccctcttccatctcatcctcagggaagcctttcctgactccctagactgcctaggaatctactttacactggaagaatacccagtgctctccttggcagcatgtgtttgataagacacactgtattaacaggtacattccatcattgtagaaatattcaaggccaggcgcggtggctcatgcctgtaatctcagcactttgggaggctgaagcaggcggatcatttgaggccaggagttcaagaccagcatggccaacatggcaaaaccccatctctactaaaaatacaaaaattagccagacatggttaaacctgggagctggaggttgcagtgagcggagattgtgccactgcagtccagcctgggcaacagagtgagactctgtctcaaaaaataaaaataaaaaaaaataactagggtataggcccatcccaacctgatcatttttctctttttttttgagacagagtctcgctgtgtcgcctaggctggagtgcagtggcatgatcttggctcactgcaagctccgcctcctgggttcacgccattcttctaccttagcctccccagcagctgggactacaggcacccgccaccacacccggctaatttttttgtatttttggtagagacggggtttcaccctgttagccaggatggtctggatctcctgacctcgtgattcgcccacctcggcctctcaaagtgctgggattacaggcgtgacccaccgtgcccggccgatcatttttctcttaatagcaggctctttctgtccgagaaagagttagtcttctgttagtaaaagcttaggcaaaaagcaagaagctgtcattatgtctcctgtactaaatagaccttgtttgcctcttacaagccaaggcgaatacctggactgcatggtaataagtatctgtcttctttttttttgagacagagtttcactcctgttgcccaggctggagtgcaatggcatgatctcagctcaccgcaacctccgcctcctgagttcaagcagttctcctgcctcagcctcctgaatagctcggattacaggcatgtgccaccacacccagctagttttgtatttttagtagagacggggtttctccatgttggtcaggcttgtctcgaactcccaacctcaggtgatcgcctgtcttggcctcccaaagtgctaggattacaggcgtgcgccactgcacccagccataagtatctctttatagtgaagacatgagagtcagctttgtgcctggtgaccagctgtgatctagatctctcagtcacttcacttggctctgaacccttcatggaacaacctttggttttcattttgcttcctgattcattttgtacactgaccagccagcaagaaccttttgtgccatttggcatatttctcattgtaaattatttttatttgtgagatggagtctcactctgtcaccaggctggagtacagtggtatgatcttggcttactgcaacctctgcctcccaggttcacctgattctcatgcctcagcctcctgagtagctgggattacaggagtgcaccaccacgcccagctaatttttgtatttttttttagtagagacggggtttcaccatgtcggccaggatggtctcgatctcctgatctcttgatccgcctccctcagcctcccaaagtgctgagccaccacgcccggcctctcatggtagattattaaatgggcagtctgaatcatttggtagtcctcggtgaatctggttagcatattgtccctcctgtacctgatcaactcttggtacagtgataaaaccgagctgctgatatacttttattttttattttatttatttttttgagacagagtctcactctgtcaccaggctggagtgcagtggtgcgatcttagctcactgcaacctctgcctcccagattcaagcgattctcctgccttagcctcccgagtagctgagattacagacgcccactaccacacctggctaatttttttgtatttttagtagagacagggtttcaccatattggccaggctggtctcgaactcctgacctcgtgatccacccaccttggccccccagagtgctgggattacaggcgtgagccaccgtgcccggactttattgtaattttctttttttccctttttttttttttttttgagatggagtcttgctctgtcaccaggctggaatgcagtggcaccacctcagttcaccacaacctccacctcccaggttcaagtgattctcctgcctcagcctcccaagtagctgggactacaggtgtgtgcccaccaccacgcccagctaatttttgtatttttagtagacacagggtttcaccatgttggccaggatggtctcggtatcttgacctcgtgattcacctgcgtcagcctcccaatgtgctggtccagggattacaggtgtgagccaccgcacccagcccctcattgtgattttgatttgccttttcttattgattaatgacgttaaacatcccaaatgtgcttgttggccatctttatatcttatttgaaaaaatgtctaagattatctcttttttttctcctttttttggttttgtattatttttattatctcattttaaattttttcgcctgtcagataagattctcttttattagaataagatactacattagtcaggcctggtgcaagtgcctgtggtcccagctacttgggaggctgaggtggatggattgcttgagtctgggaggcagacattgcagtaaggtgagaataagatactacatttgatcatcaaaattatgcttagcttcacttttttgttgttgttgtcttttaccttgcagctccagctcaaaggattagcttcacttttaaacatttttggccaggtgcggtggctcacgcctgtaatcccagcactttgggaggccaacgcaggtggatcacctgaggtcaggagttcgagaccagcctggccaacatggtgaaacctggtctttcctaaaaatacaaacattagccgggcgtggtgacacacacctgtagtcccagctactcaggaggctgaggcatgaaaatcacttgaacctgggtggtggaggttgcagtgagccaagatcgtgccactgcactgcagcctggctgacagagtgagattctgtctttaaaaaaaaaattgaccatctgaaccatttctaagtgtatagtcgtgttaagcacattcacgatgttgtgcggcaaatctccaggacgttttcatcttgcaaactaagcctcaatactcattaaacttagcttgacttttgatatgtaattttttatatgttttgtttcctttctgttttattaacatgaagtttctggagcagcagagctgaaggaacccaaacttggactgaagtgactctactaaggtaatgcctccttttgacatcctatctgggccagtggcagacccctctccctgacagtgctgggtccagggctccaggcagccaggggaagatgaagacaggcactaatttcccccttgaaaggttggccctggacacttacccacacatcagtgccatcctcacccaaatgtttctatgcatgaccaattggaatcactatggaacatggaaaagcttttcccacaaaagaagtggtcatctttgaaaccctgagcactctcatgcactggaactcaggtatgattttctggagggcagtttgatggtgtgtatcaaaaatctgagccatgggaatttgagaccacctgaacagcatagcaaggctctgtctctaccaaaaacaaaacaaaacaaaataaaaccaaaacctgagccatggacctactctgacccagtggtataccaggattttattttaaaggaaaataaaaacatgacatgttcaatgatgagtgtgtgagtgtataggatgttcattgccacattgtgtataatagaatgaaactagctacaacctatataaacagttgaagattggttaaaaagtcaagatccatctatgtatgaaaatgaagctaaacataaattgtgatttttccttaggcattataacaaagggttatattttatctttattgtttctccattaaaaaaatttactcgatatatataatttttagaaagaaaaaatagttgatctatatgagacataaaatgtgtgtgtgtgtgtgtgtgtgtgtgtgtgtgtgtattagtctgttctcacactgctgtgaagaaatacccaagactgggtaatttataaaggaaagaggttttattgactcacagttctgcaagggtggacaggcctcaggaaacttacaatcatgacagaaggggaagcaaacacatccttcttcacatggcagcagcagggagatgtgcagagcaaagagggaggtaaagcctcttataaaaccatcagatctcaggagaactcactatcacgagaacagcatggaggtgaccgcccccatgattcatttactttccaccgggcccctcccacaacaagtggggattatagga

SEQ ID NO: 312 - DNA, 3776 bp, Homo sapiens
gcgggtgagctctgcccaagccgaggctgcggggccggcgccggcgggaggactgcggtgccccgcggaggggctgagtttgccagggcccacttgaccctgtttcccacctcccgccccccaggtccggaggcgggggcccccggggcgactcgggggcggaccgcggggcggagctgccgcccgtgagtccggccgagccacctgagcccgagccgcgggacaccgtcgctcctgctctccgaatgctgcgcaccgcgatgggcctgaggagctggctcgccgccccatggggcgcgctgccgcctcggccaccgctgctgctgctcctgctgctgctgctcctgctgcagccgccgcctccgacctgggcgctcagcccccggatcagcctgcctctgggctctgaagagcggccattcctcagattcgaagctgaacacatctccaactacacagcccttctgctgagcagggatggcaggaccctgtacgtgggtgctcgagaggccctctttgcactcagtagcaacctcagcttcctgccaggcggggagtaccaggagctgctttggggtgcagacgcagagaagaaacagcagtgcagcttcaagggcaaggacccacagcgcgactgtcaaaactacatcaagatcctcctgccgctcagcggcagtcacctgttcacctgtggcacagcagccttcagccccatgtgtacctacatcaacatggagaacttcaccctggcaagggacgagaaggggaatgtcctcctggaagatggcaagggccgttgtcccttcgacccgaatttcaagtccactgccctggtggttgatggcgagctctacactggaacagtcagcagcttccaagggaatgacccggccatctcgcggagccaaagccttcgccccaccaagaccgagagctccctcaactggctgcaagacccagcttttgtggcctcagcctacattcctgagagcctgggcagcttgcaaggcgatgatgacaagatctactttttcttcagcgagactggccaggaatttgagttctttgagaacaccattgtgtcccgcattgcccgcatctgcaagggcgatgagggtggagagcgggtgctacagcagcgctggacctccttcctcaaggcccagctgctgtgctcacggcccgacgatggcttccccttcaacgtgctgcaggatgtcttcacgctgagccccagcccccaggactggcgtgacacccttttctatggggtcttcacttcccagtggcacaggggaactacagaaggctctgccgtctgtgtcttcacaatgaaggatgtgcagagagtcttcagcggcctctacaaggaggtgaaccgtgagacacagcagtggtacaccgtgacccacccggtgcccacaccccggcctggagcgtgcatcaccaacagtgcccgggaaaggaagatcaactcatccctgcagctcccagaccgcgtgctgaacttcctcaaggaccacttcctgatggacgggcaggtccgaagccgcatgctgctgctgcagccccaggctcgctaccagcgcgtggctgtacaccgcgtccctggcctgcaccacacctacgatgtcctcttcctgggcactggtgacggccggctccacaaggcagtgagcgtgggcccccgggtgcacatcattgaggagctgcagatcttctcatcgggacagcccgtgcagaatctgctcctggacacccacagggggctgctgtatgcggcctcacactcgggcgtagtccaggtgcccatggccaactgcagcctgtacaggagctgtggggactgcctcctcgcccgggacccctactgtgcttggagcggctccagctgcaagcacgtcagcctctaccagcctcagctggccaccaggccgtggatccaggacatcgagggagccagcgccaaggacctttgcagcgcgtcttcggttgtgtccccgtcttttgtaccaacaggggagaagccatgtgagcaagtccagttccagcccaacacagtgaacactttggcctgcccgctcctctccaacctggcgacccgactctggctacgcaacggggcccccgtcaatgcctcggcctcctgccacgtgctacccactggggacctgctgctggtgggcacccaacagctgggggagttccagtgctggtcactagaggagggcttccagcagctggtagccagctactgcccagaggtggtggaggacggggtggcagaccaaacagatgagggtggcagtgtacccgtcattatcagcacatcgcgtgtgagtgcaccagctggtggcaaggccagctggggtgcagacaggtcctactggaaggagttcctggtgatgtgcacgctctttgtgctggccgtgctgctcccagttttattcttgctctaccggcaccggaacagcatgaaagtcttcctgaagcagggggaatgtgccagcgtgcaccccaagacctgccctgtggtgctgccccctgagacccgcccactcaacggcctagggccccctagcaccccgctcgatcaccgagggtaccagtccctgtcagacagccccccgggggcccgagtcttcactgagtcagagaagaggccactcagcatccaagacagcttcgtggaggtatccccagtgtgcccccggccccgggtccgccttggctcggagatccgtgactctgtggtgtgagagctgacttccagaggacgctgccctggcttcaggggctgtgaatgctcggagagggtcaactggacctcccctccgctctgctcttcgtggaacacgaccgtggtgcccggcccttgggagccttggggccagctggcctgctgctctccagtcaagtagcgaagctcctaccacccagacacccaaacagccgtggccccagaggtcctggccaaatatgggggcctgcctaggttggtggaacagtgctccttatgtaaactgagccctttgtttaaaaaacaattccaaatgtgaaactagaatgagagggaagagatagcatggcatgcagcacacacggctgctccagttcatggcctcccaggggtgctggggatgcatccaaagtggttgtctgagacagagttggaaaccctcaccaactggcctcttcaccttccacattatcccgctgccaccggctgccctgtctcactgcagattcaggaccagcttgggctgcgtgcgttctgccttgccagtcagccgaggatgtagttgttgctgccgtcgtcccaccacctcagggaccagagggctaggttggcactgcggccctcaccaggtcctgggctcggacccaactcctggacctttccagcctgtatcaggctgtggccacacgagaggacagcgcgagctcaggagagatttcgtgacaatgtacgcctttccctcagaattcagggaagagactgtcgcctgccttcctccgttgttgcgtgagaacccgtgtgccccttcccaccatatccaccctcgctccatctttgaactcaaacacgaggaactaactgcaccctggtcctctccccagtccccagttcaccctccatccctcaccttcctccactctaagggatatcaacactgcccagcacaggggccctgaatttatgtggtttttatacattttttaataagatgcactttatgtcattttttaataaagtctgaagaattactgtttaa

SEQ ID NO: 313 - protein, 827 aa, Homo sapiens
MLRTAMGLRSWLAAPWGALPPRPPLLLLLLLLLLLQPPPPTWALSPRISLPLGSEERPFLRFEAEHNYTALLLSRDGRTLYVGAREALFALSSNLSFLPGGEYQELLWGADAEKKQQCSFKGKDPQRDCQNYIKILLPLSGSHLFTCGTAAFSPMCTYINMENFTLARDEKGNVLLEDGKGRCPFDPNFKSTALVVDGELYTGTVSSFQGNDPAISRSQSLRPTKTESSLNWLQDPAFVASAYIPESLGSLQGDDDKIYFFFSETGQEFEFFENTIVSRIARICKGDEGGERVLQQRWTSFLKAQLLCSRPDDGFPFNVLQDVFTLSPSPQDWRDTLFYGVFTSQWHRGTTEGSAVCVFTMKDVQRVFSGKEVNRETQQWYTVTHPVPTPRPGACITNSARERKINSSLQLPDRVLNFLKDHFLMDGQVRSRMLLLQPQARYQRVAVHRVPGLHHTYDVLFLGTGDGRLHKAVSVGPRVHIIEELQIFSSGQPVQNLLLDTGLLYAASHSGVVQVPMANCSLYRSCGDCLLARDPYCAWSGSSCKHVSLYQPQLAWWIQDIEGASAKDLCSASSVVSPSFVPTGEKPCEQVQFQPNTVNTLACPLLSNLATRLWLRNGAPVNASASCHVLPTGDLLLVGTQQLGEFQCWSLEEGFQQLVASYCPEVVEDGVADQTDEGGSVPVIISTSRVSAPAGGKASWGADRSYWKEFLVMCTLFVLAVLLPVLFLLYRHRNSMKVFLKQGECASVHPKTCPVVLPPEWLNGLGPPSTPLDHRGYQSLSDSPPGARVFTESEKRPLSIQDSFVEVSPVCPRPRVRLGSEIRDSVV

SEQ ID NO: 314 - DNA, 2498 bp, Homo sapiens
cgccgcgccggactgaggctgtgcgcccgagactccgggtccccaggggctgcgccgggccggcctggcaagggggacgagtcagtggacactccaggaagagcggccccgcggggggcgatgaccgtgcgctgaccctgactcactccaggtccggaggcgggggcccccggggcgactcgggggcggaccgcggggcggagctgccgcccgtgagtccggccgagccacctgagcccgagccgcgggacaccgtcgctcctgctctccgaatgctgcgcaccgcgatgggcctgaggagctggctcgccgccccatggggcgcgctgccgcctcggccaccgctgctgctgctcctgctgctgctgctcctgctgcagccgccgcctccgacctgggcgctcagcccccggatcagcctgcctctgggctctgaagagcggccattcctcagattcgaagctgaacacatctccaactacacagcccttctgctgagcagggatggcaggaccctgtacgtgggtgctcgagaggccctctttgcactcagtagcaacctcagcttcctgccaggcggggagtaccaggagctgctttggggtgcagacgcagagaagaaacagcagtgcagcttcaagggcaaggacccacagcgcgactgtcaaaactacatcaagatcctcctgccgctcagcggcagtcacctgttcacctgtggcacagcagccttcagccccatgtgtacctacatcaacatggagaacttcaccctggcaagggacgagaaggggaatgtcctcctggaagatggcaagggccgttgtcccttcgacccgaatttcaagtccactgccctggtggttgatggcgagctctacactggaacagtcagcagcttccaagggaatgacccggccatctcgcggagccaaagccttcgccccaccaagaccgagagctccctcaactggctgcaagacccagcttttgtggcctcagcctacattcctgagagcctgggcagcttgcaaggcgatgatgacaagatctactttttcttcagcgagactggccaggaatttgagttctttgagaacaccattgtgtcccgcattgcccgcatctgcaagggcgatgagggtggagagcgggtgctacagcagcgctggacctccttcctcaaggcccagctgctgtgctcacggcccgacgatggcttccccttcaacgtgctgcaggatgtcttcacgctgagccccagcccccaggactggcgtgacacccttttctatggggtcttcacttcccagtggcacaggggaactacagaaggctctgccgtctgtgtcttcacaatgaaggatgtgcagagagtcttcagcggcctctacaaggaggtgaaccgtgagacacagcagtggtacaccgtgacccacccggtgcccacaccccggcctggagcgtgcatcaccaacagtgcccgggaaaggaagatcaactcatccctgcagctcccagaccgcgtgctgaacttcctcaaggaccacttcctgatggacgggcaggtccgaagccgcatgctgctgctgcagccccaggctcgctaccagcgcgtggctgtacaccgcgtccctggcctgcaccacacctacgatgtcctcttcctgggcactggtgacggccggctccacaaggcagtgagcgtgggcccccgggtgcacatcattgaggagctgcagatcttctcatcgggacagcccgtgcagaatctgctcctggacacccacagggggctgctgtatgcggcctcacactcgggcgtagtccaggtgcccatggccaactgcagcctgtacaggagctgtggggactgcctcctcgcccgggacccctactgtgcttggagcggctccagctgcaagcacgtcagcctctaccagcctcagctggccaccaggccgtggatccaggacatcgagggagccagcgccaaggacctttgcagcgcgtcttcggttgtgtccccgtcttttgtaccaacaggggagaagccatgtgagcaagtccagttccagcccaacacagtgaacactttggcctgcccgctcctctccaacctggcgacccgactctggctacgcaacggggcccccgtcaatgcctcggcctcctgccacgtgctacccactggggacctgctgctggtgggcacccaacagctgggggagttccagtgctggtcactagaggagggcttccagcagctggtagccagctactgcccagaggtggtggaggacggggtggcagaccaaacagatgagggtggcagtgtacccgtcattatcagcacatcgcgtgtgagtgcaccagctggtggcaaggccagctggggtgcagacaggtcctgggctcggacccaactcctggacctttccagcctgtatcaggctgtggccacacgagaggacagcgcgagctcaggagagatttcg

SEQ ID NO: 315 - protein, 734 aa, Homo sapiens
MLRTAMGLRSWLAAPWGALPPRPPLLLLLLLLLLLQPPPPTWALSPRISLPLGSEERPFLRFEAEHNYTALLLSRDGRTLYVGAREALFALSSNLSFLPGGEYQELLWGADAEKKQQCSFKGKDPQRDCQNYIKILLPLSGSHLFTCGTAAFSPMCTYINMENFTLARDEKGNVLLEDGKGRCPFDPNFKSTALVVDGELYTGTVSSFQGNDPAISRSQSLRPTKTESSLNWLQDPAFVASAYIPESLGSLQGDDDKIYFFFSETGQEFEFFENTIVSRIARICKGDEGGERVLQQRWTSFLKAQLLCSRPDDGFPFNVLQDVFTLSPSPQDWRDTLFYGVFTSQWHRGTTEGSAVCVFTMKDVQRVFSGKEVNRETQQWYTVTHPVPTPRPGACITNSARERKINSSLQLPDRVLNFLKDHFLMDGQVRSRMLLLQPQARYQRVAVHRVPGLHHTYDVLFLGTGDGRLHKAVSVGPRVHIIEELQIFSSGQPVQNLLLDTGLLYAASHSGVVQVPMANCSLYRSCGDCLLARDPYCAWSGSSCKHVSLYQPQLAWWIQDIEGASAKDLCSASSVVSPSFVPTGEKPCEQVQFQPNTVNTLACPLLSNLATRLWLRNGAPVNASASCHVLPTGDLLLVGTQQLGEFQCWSLEEGFQQLVASYCPEVVEDGVADQTDEGGSVPVIISTSRVSAPAGGKASWGADRSWARTQLLDLSSLYQAVATREDSASSGEIS

SEQ ID NO: 316 - DNA, 3918 bp, Homo sapiens
cgccgcgccggactgaggctgtgcgcccgagactccgggtccccaggggctgcgccgggccggcctggcaagggggacgagtcagtggacactccaggaagagcggccccgcggggggcgatgaccgtgcgctgaccctgactcactccaggtccggaggcgggggcccccggggcgactcgggggcggaccgcggggcggagctgccgcccgtgagtccggccgagccacctgagcccgagccgcgggacaccgtcgctcctgctctccgaatgctgcgcaccgcgatgggcctgaggagctggctcgccgccccatggggcgcgctgccgcctcggccaccgctgctgctgctcctgctgctgctgctcctgctgcagccgccgcctccgacctgggcgctcagcccccggatcagcctgcctctgggctctgaagagcggccattcctcagattcgaagctgaacacatctccaactacacagcccttctgctgagcagggatggcaggaccctgtacgtgggtgctcgagaggccctctttgcactcagtagcaacctcagcttcctgccaggcggggagtaccaggagctgctttggggtgcagacgcagagaagaaacagcagtgcagcttcaagggcaaggacccacagcgcgactgtcaaaactacatcaagatcctcctgccgctcagcggcagtcacctgttcacctgtggcacagcagccttcagccccatgtgtacctacatcaacatggagaacttcaccctggcaagggacgagaaggggaatgtcctcctggaagatggcaagggccgttgtcccttcgacccgaatttcaagtccactgccctggtggttgatggcgagctctacactggaacagtcagcagcttccaagggaatgacccggccatctcgcggagccaaagccttcgccccaccaagaccgagagctccctcaactggctgcaagacccagcttttgtggcctcagcctacattcctgagagcctgggcagcttgcaaggcgatgatgacaagatctactttttcttcagcgagactggccaggaatttgagttctttgagaacaccattgtgtcccgcattgcccgcatctgcaagggcgatgagggtggagagcgggtgctacagcagcgctggacctccttcctcaaggcccagctgctgtgctcacggcccgacgatggcttccccttcaacgtgctgcaggatgtcttcacgctgagccccagcccccaggactggcgtgacacccttttctatggggtcttcacttcccagtggcacaggggaactacagaaggctctgccgtctgtgtcttcacaatgaaggatgtgcagagagtcttcagcggcctctacaaggaggtgaaccgtgagacacagcagtggtacaccgtgacccacccggtgcccacaccccggcctggagcgtgcatcaccaacagtgcccgggaaaggaagatcaactcatccctgcagctcccagaccgcgtgctgaacttcctcaaggaccacttcctgatggacgggcaggtccgaagccgcatgctgctgctgcagccccaggctcgctaccagcgcgtggctgtacaccgcgtccctggcctgcaccacacctacgatgtcctcttcctgggcactggtgacggccggctccacaaggcagtgagcgtgggcccccgggtgcacatcattgaggagctgcagatcttctcatcgggacagcccgtgcagaatctgctcctggacacccacagggggctgctgtatgcggcctcacactcgggcgtagtccaggtgcccatggccaactgcagcctgtacaggagctgtggggactgcctcctcgcccgggacccctactgtgcttggagcggctccagctgcaagcacgtcagcctctaccagcctcagctggccaccaggccgtggatccaggacatcgagggagccagcgccaaggacctttgcagcgcgtcttcggttgtgtccccgtcttttgtaccaacaggtgaggtgccccctcaaaaggtggaggagagaggtggggacaagtgtgcttggaaggctcccccaggcacagatgttgtaaatgcctttcctcacttccttgccccctacccctgggagaagccatgtgagcaagtccagttccagcccaacacagtgaacactttggcctgcccgctcctctccaacctggcgacccgactctggctacgcaacggggcccccgtcaatgcctcggcctcctgccacgtgctacccactggggacctgctgctggtgggcacccaacagctgggggagttccagtgctggtcactagaggagggcttccagcagctggtagccagctactgcccagaggtggtggaggacggggtggcagaccaaacagatgagggtggcagtgtacccgtcattatcagcacatcgcgtgtgagtgcaccagctggtggcaaggccagctggggtgcagacaggtcctactggaaggagttcctggtgatgtgcacgctctttgtgctggccgtgctgctcccagttttattcttgctctaccggcaccggaacagcatgaaagtcttcctgaagcagggggaatgtgccagcgtgcaccccaagacctgccctgtggtgctgccccctgagacccgcccactcaacggcctagggccccctagcaccccgctcgatcaccgagggtaccagtccctgtcagacagccccccgggggcccgagtcttcactgagtcagagaagaggccactcagcatccaagacagcttcgtggaggtatccccagtgtgcccccggccccgggtccgccttggctcggagatccgtgactctgtggtgtgagagctgacttccagaggacgctgccctggcttcaggggctgtgaatgctcggagagggtcaactggacctcccctccgctctgctcttcgtggaacacgaccgtggtgcccggcccttgggagccttggggccagctggcctgctgctctccagtcaagtagcgaagctcctaccacccagacacccaaacagccgtggccccagaggtcctggccaaatatgggggcctgcctaggttggtggaacagtgctccttatgtaaactgagccctttgtttaaaaaacaattccaaatgtgaaactagaatgagagggaagagatagcatggcatgcagcacacacggctgctccagttcatggcctcccaggggtgctggggatgcatccaaagtggttgtctgagacagagttggaaaccctcaccaactggcctcttcaccttccacattatcccgctgccaccggctgccctgtctcactgcagattcaggaccagcttgggctgcgtgcgttctgccttgccagtcagccgaggatgtagttgttgctgccgtcgtcccaccacctcagggaccagagggctaggttggcactgcggccctcaccaggtcctgggctcggacccaactcctggacctttccagcctgtatcaggctgtggccacacgagaggacagcgcgagctcaggagagatttcgtgacaatgtacgcctttccctcagaattcagggaagagactgtcgcctgccttcctccgttgttgcgtgagaacccgtgtgccccttcccaccatatccaccctcgctccatctttgaactcaaacacgaggaactaactgcaccctggtcctctccccagtccccagttcaccctccatccctcaccttcctccactctaagggatatcaacactgcccagcacaggggccctgaatttatgtggtttttatacattttttaataagatgcactttatgtcattttttaataaagtctgaagaattactgtttaat

SEQ ID NO: 317 - protein, 865 aa, Homo sapiens
MLRTAMGLRSWLAAPWGALPPRPPLLLLLLLLLLLQPPPPTWALSPRISLPLGSEERPFLRFEAEHNYTALLLSRDGRTLYVGAREALFALSSNLSFLPGGEYQELLWGADAEKKQQCSFKGKDPQRDCQNYIKILLPLSGSHLFTCGTAAFSPMCTYINMENFTLARDEKGNVLLEDGKGRCPFDPNFKSTALVVDGELYTGTVSSFQGNDPAISRSQSLRPTKTESSLNWLQDPAFVASAYIPESLGSLQGDDDKIYFFFSETGQEFEFFENTIVSRIARICKGDEGGERVLQQRWTSFLKAQLLCSRPDDGFPFNVLQDVFTLSPSPQDWRDTLFYGVFTSQWHRGTTEGSAVCVFTMKDVQRVFSGKEVNRETQQWYTVTHPVPTPRPGACITNSARERKINSSLQLPDRVLNFLKDHFLMDGQVRSRMLLLQPQARYQRVAVHRVPGLHHTYDVLFLGTGDGRLHKAVSVGPRVHIIEELQIFSSGQPVQNLLLDTGLLYAASHSGVVQVPMANCSLYRSCGDCLLARDPYCAWSGSSCKHVSLYQPQLAWWIQDIEGASAKDLCSASSVVSPSFVPTGEVPPQKVEERGGDKCAWKAPPGTDVVNAFPHFLAPYPWEKPCEQVQFQPNTVNTLACPLLSNLATRLWLRNGAPVNASASCHVLPTGDLLLVGTQQLGEFQCWSLEEGFQQLVASYCPEVVEDGVADQTDEGGSVPVIISTSRVSAPAGGKASWGADRSYWKEFLVMCTLFVLAVLLPVLFLLYRHRNSMKVFLKQGECASVHPKTCPVVLPPEWLNGLGPPSTPLDHRGYQSLSDSPPGARVFTESEKRPLSIQDSFVEVSPVCPRPRVRLGSEIRDSVV

SEQ ID NO: 318 - DNA, 47307 bp, Mus musculus
tcctgggcctcaggttccaaagctggcgcggagggctgtggttggagaagtttctttatctatgaaagtggtttccgaactctgctgttgatagcgccactcacactgagttattgaaggtttccgaaaacaagttcattcaaaaatagctaaataaagcgtactgaaacagtgtcatgcaaatgtaaaagcaaagcaaaggcaacaaaataactgttacttgagacagagccgtaatctcaacactcagaagactggagcagcaagatcccttttgaatccgacctgagctacatagtaagtgagattcctgtagggggaaaaacccaactaccaaaaaaaaaaaaaaaaaaaaaaaagagagagagagagagagagagagagagagagagagagagagagagagagaaaagaaaaaaaccatgagcttatgatcacgatcaagcttattggtaattggtagagtaccgtagtaggttgaacttcattcccagaacttgaaaaagctattcatgtgtgaactattatgccatattcaactccagcccttaaaagcaaccataaactcttggaattcaagatcctcagcctgaaacactcaggagtataattaggtgggtctgcaacttggactcgggaagccacttccctgcccaaccccaacaaagctatagaatgtgtttggaatcccaagctagcaccagaaaaagattaatttgcagtgtatccgagttctggctaaaggcaggggagcagaatgcaaactggggagggtgaggggtgatctgtgggtaggaagaataaatcactgatgtggggctcaatttttttctcccttagttctaaagatagtcttgatcaaatcataaatcctatcaattggaaacccttctcccgtttctgtttcctgcattcctcccactgtcttgcagcctgtgtcccttgacctgttaggttggctttggagacttgcagtcccacccacttcctgctcctttcagagtatgaagcactctggatctgagtcagggaacttggagccagcagaggagaccagggcagagagatccctgtcctcttccgctctccgaagcacacagctgatctgaagtccaagggtttctccagaagcacccatcaggtctgctgcagcagggcaacccactaggtgcatctctcggttgagggtttcctgttcggtgtgttagaggttcaggaagtttgactaactagccaggcagcacttgaggctttgacagaggccttggactggtgcctcaatgtttcacatcctgtgtctttgagctattaaagtaccctattgattggcattaggcaggcagtcttggtcattagcttcctggctagtctctgctttaagtagttttcctggcaaggcaggaactcttctaaattgctattgatttttgaggactgtggtttctccctgaacctttgggcccagattaatatgtgtgagcatttatgggaatttttgctctaactcttggcttgtagggagacttgtttcatcaagcaaaggtggttgtgttacaaaaggagtaccaggcactatgggccatttgttttacaaactatcttgtagtatccatgatgtcctaatcacaggtaatggtactgagaatacacagtggactggacacacatatacataaatatgcacacaatgtgcacatccacacgctcacacaaacacactcacacatccttagtttttagatgctgaacctattgggaaagaaaacaagagacaagataagcgaattgactgggcagatagcaatttgacttgacattttatattttcctcagattaatatccactcccaaacctagctgggtctcctttcctggctttcatccagttgttaatagagctgggcttggagttgagcttatcccaaagaagtgtacagaatccctgggtttaccctgtctgcggaatcaactgtgagatttgaatagaagttgactgttctctttttttttgcacctacaaataattcccccgaccacacccttctctagctgtgcgccacgagagaggaaattccaggccttaacagaaattctttccacccattcacagtctggcgtggttttccttttgttaccagaggcagtgcccatccgtgttgtggaggggacttgtgattctgggtgggtccactgatatgatctccagatgttcccgctaggatgcacactgaagtttttaaatgatccgagctccgatcttctcagggtacccatctgcagcactggagtagtctagttccaatcccagacttgatgtggacactctgaccacaggaatgacttggaaccatttgtgtgtgccctttgtctcctggccacacccagaggacactcacagctctaaggagtcacagggccacgtggatctcccacgtcccttctgctacctttttgtcgtcgtcatctggctctctgcctgctcctgtaaatggatgcgatggttcccatgctgttctgaggcagagctagggccatctcatccagatactgtggagatggtacaaggcgcttagcacaaatgggaagaggctgccctgagatgagctgctaggctgcgtgaagatgctcagaggctggaaatgggggctcccaggtctgaatgggtggaaccaggcctggattttaaacacacagtcctgggtagagaaaggaaattgaaaaaggcaactattttggaaatgacaaagtagacctaaaacaggaagacccagtgtgtgaaccacctactatacgctaggtactgtcagtcccagaagtcaggagaaaagagtaagtcacatgactggacagtgtgggaagtgtcctctacacactcagttctggcagggcaggagatctgggctaggtgacatcgttatgattgtctttgacttaaagtctcacttaaatgcccactgatcaagatggagtgttcctggtggacaggcatatagtactgggcatgttgagaggagagttagtgacctagcctgacttatgtggagggtgcttgtgcgtgtatgttcatgtgctaagactatattgaaagactggtagtgttgctgagtgggtagagtacttgcctactggaacaagccctggattccatccccagcaccacaggaaaccgggaggtgggaggttcaagatcaccctcagctacatagtgagtttgaggccagcctgtgctacagaagagacctcgtctaaagagagaaaaggggaggaggaggagagagaagaaaccacagacttagagggagggaggttcagggtgtggtggattatcttgaacttggacttttctctggcagccgagccctgttggaagcctgtgtgtgggcgggccataggacaccgagattgaattgtagctgctcccggggcttcggggcttcgatcctcaagcctgaacgtgtttcttcctggatggcctctttccaccagctccaactctatcagctcccagggcaacgtggcagtgtgtgtagctagcaaacaaatattgattcagatcagacagccagagggacggcaagcactggagaggcctcttctgagtctgatcaaggccatgggcagaattccaggagtgctggggcttaacttggccctgtgactcaagcattaatcagaaccataaaactaagggggaaagtatgtgccttcaagaaggttctgttaaccagagatgatttaacggggtgaagggtggggtagagtgggaactccctctcccatcattcacgcgtgggtttttttcttttaattgttgtttaaaatcccagtgtggtctgtacacttcgatgtccaggacctacagtaagggctgtggtggggaaacccagccctccacattcccacccccacacattctggctttaaaatcctggtttgaggtcattccattccctgattgactcatcgtggtggtggttgctaggcatctgttttggggtaacccaacaacagacttgtctttttaactactctccaagtgggtgtgtctctgaaactgccagtgggtgtgtctctgaaactgccaggttggattccctacaaaccagccctgtcaagctcctgggtttggttgttgggttttttttttgttttttgttttttttttttaaattaatatctgggcttcctggaactagcactttttagctctgtgaatcttatttttactgtttccagcgttgcctgtgagattctttctctcaggttttttgaaaacctctgtttggttttctttttgcaggagagaggttaaaaagaacgccatttgtactttctggtcattgttgtaactatggtttttcgaacaaaacaataaaatgtaataagatctagatattagggtttttgtttgtttgtttgtgttttaaagacaaacctataaattatttgtaagcagactgtctgttacaggcaaacgactgcctggctgaccttgtaagagcaacgcagattgtgttactgccaagctttgcccctgagagccttgagccatcaggttaagtctcatttactaatattttcaaggccacaggagacactctgttcccttcatttagggaggagctgaggcaggcctgttttcccaccagtgggggttgggcagagccacttgagattggctggaggggtgtgtagctttcagtctgccaggacttggctggtttattttcttaagcaaaaacacctgcctgagaaagggcccttttcacagtgtagccaggtcccagcctgcttagcttagcgttctctagcagatggctcaccagatagctctttctggtatgcaggctgaaactagttggccagcttcgtgaagttgaggtacagggaagagagatgcagtttgggggagcagcctgccagaaggggagggtggctgtgtctgtaactaagtcaccctgagttttacattttggaggagctccttaagacagggtctcacgtagctcaggttagcctcaaactcagtatgtagacaaagatgaacttgccgtcctcccacctccactgctaagagctgggattacaggcgtggctcttcacagctggcttttgtagatctctttaaatgttgggttttggtgcgtgggtcaatactaactggtactggtctagtcactttggccctcccaccttccaccgttctgttaaccaaacttaactttgcaccatttgctcgggcccttgggctttagagtcatctcatggacatggcttcctaccacgcctgtccccttgtttgcctgagatacgatatatatgctgaggtatgtattcctccacagggtcctactatctccatcccccgatgacgtgttcctctggctgatgactcgtctctctcagcctacacatagaggcctccccattaggccctctacttcctagatctttgtgatgttaaacgtccattgaagagtcatcagggtctaaagcgcaaaggcagaggactcaaaggtccctgctcttctgcaggccagggctattctcttaagtgtctctcatacaagtgatctattccttacttctcaggttcctgtgactaaatacctagccaactacaagcccgtgaagggggcggggcttacttcaccttatagttgacgtggatacactgtaacggctgggaaggcagggaagcaggagcttgaggaggcagctggtcacattgtgcacacacaggccggaagctcagagagatgaaagctgaatctcaggatacttactgtctttggggatttttgtttgtgtttttttgtatatagtttatgaccgaagctcacgacatagtaccactcccatttaagatgggtcttcccattctaatgaccctacactaggaaatccctcataggaacctcccaagatgcgtttccatggtaaacggaaatctactgaagttcaacagtgaaccttttccatgacaggagggaagctgagggtgagaattcttcgtctcttcagcgccatgtcagtgtgtggttatccggagtttgtggaggatctgaccattaccagagacttcactggcactgcaaaggcctttgctgacctggggaggtgtaacgcactgacccattctcagtaatcaaactagagttttagcaatcctagtgagaagcaaagctcactctgtttcttctagcaacgtccctattgcgagacactgcacagcccggggtgaggtagaggagcaaaggctgtgttttatctctaagctaaaatagggttgccattaaacttgcatgagataggaaatatttatgggcataggcacttacatattgcttgtcagtctctgtgactttgggcttattatgatatttttggatttttttggtacagaatggttgtggtgtaaatgttacatattaaaaccccctcttgaggtcatgtttcggagctaatagtgaagagtgcttgttacgcaatgagaaccaaacttcacatctcagcacaaaggggctctctcattcagatggactagtgagccatctttctccagagagctcctgtctttgcctctggaacgccgggatcacaggcggactgtcatatccaccaggcttttaggtgggtgctggggatctgaactctggtctttacacctttgtggtcagtcctttaagccactgagcatctctccagctccatgacaccctgttgtgaggggggggggaaaggggtgggagtgacaggagccagaaagtaaaccaatttgccacagacaaagccaaggcaagcagcactttttgagtactaaatctttttcccaggaatggatagggggaggtgtggctgactcctgatgctgatctctgagggctgtgctcccctggagtcggagggagcagtggtcttgatttctttcttttttttttaaaagatttatttatttattatatgtaagtatactgtagctgtcttcagacactccagaagagggcgccagatctcattacggatggttgtgagccaccatgtggttgctgggaattgaactcaggacctttggaaaagcagtcagtgctcttacccactgagccatctgacaagatcagatggggagattgagttggtagccgcagggaggagaacaggtgattataaatgctggcacagaaagcaagatttgtggggctccccaaaatcccccttatttgtcctctcaaggagttggggctatgggagaagaattaaccggaacggagagtatgaggtagtacatcagattgtctttgatctgcagggcacttgggggagggcagccatccgaggagcgagcaggactcagagctgggcagacagccgggaagaacaattcaataaaaccttgctgtactgcgtagctgaagtcacctggaccacagagctggggggtggtcagctaaggaagacatctgtataggctccataaaaggcttttgggggccgagattggactgtggctttctggaattcctgtagaccagcactaatatgcagagtgctagtttcactttattctgacaaagacacagaatgtgagctgcatatatgatttttctcttagtcacattatacaacaacaaaacggttcagtgagatagctttgcaaggaaaagatacttgtcaccaagcctgaggacctgagtccagtgcttgcaacccacatagtggagggttagaaccaaccacaagttgtcctctgacctccgagtgtatgccagggcatgcacctgtgcgcacacataagttaaaaacattaaagcatactgttaatagtagtaatatggagagagcttaaggataagggctcttgtttttcttactgaggatcttgagtttggttcctagcacccacatcagtggatcacagtcacctgaactccagccccagggaagccatcaacctcttctggccgctgtaggcacccgcacttcgaatgtgtgccattgacaagtgtgtcatatacaccaccatatacaccatatacatatacaccaccaagcatcatctcaccgtctccatagagctgcctcttctagaatgccctataaccggaatcggccatctgcagctcttcagaccagtttccatcgctctggaatgggcatctaaagttcctctgtgtcttctgagatggaaaatttttttagcaccaaataatattccttttttggggggcgggggaaggatgcaccacagtttactgatacagcaagattttgacacagtgaggaagctgagggagtgaaggtcatttaaaagtcttggatgagcttcctttttgtctggtttaaaaggcttcagagggagagagaaggagaggggggagagggagagagaaggagaggggggagagggagagagaaggagagggagagagcatcttgcaagaagtgagtacatcttgaccatgaatagtgctgatctctccccaccctcccacctcacacagcctggaatctgtgtggttcagaacgcccctgtaagctggcaaatggctaggtcatatattgtaataaatataacatattatatttatatatatatatatttaagaaaacatttaggcaaagcaagttccttgaacagaatagagagcttaattcccacaagtaccaagacaactgcttggtgcaaacactgttggcaaccttttgggggaggtagctgtttcttttcggggtgtgtgtgtgtgacaatgcagaatgactcatcttgtctcagtagtaatcagtcttggtggtgggggctgggcatgtggggctatccgtcccaagaacttcctccacaaataggtaaaggcctttcatcaggatagcagtcctgactgctgaagtgtatttaggggacaatgatgacattgcaattgctctaaatcttaaatgcaagatcagccctcaaagagatgtgttcatatcagaaagttggtctatttgcattttaagaacagtttaataacttctttgcgtatgtacgcatgcatgtgcatatgtatgggcctgggtgcacttgtgagtggaggtcagaggtctcctcaggtggtatccaccttgctttttgaggcaaggctctcagtgacttgagccttgccaattaggttgggctggctggccgccatggagccgcagaaatccacccacctcctagtgcttcaagattcccagactttttcatatgggttctggggagcgaaccaaggatttgtacttattaggtgagcgtgttatagatgaacccatggcctagcccctgaatcttctgagtgtcactgggaaaaacagttgtggggctaatggtaaaagattccgtttgggccaacatggaggcactattgagcccagttcttgcctttcttacaatgtgaagtcacttgtgagcgacacacaagtcatggcagttttcatgtgcttgccactttttttttttttttttttggtttttcgagacagggtttctctgtatagccctggctgtcctagaactcactctgtagaccaggctggccttgaactcagaaatctgcctgcctctgcctcccaagtgctgggattaaaagcgtgcgccaccacgcccggcttgtgcttgccacttttgatggaagaacatgttttctgtttgaacaagtggtgtttgccacagggagcttttagcttttacattcgcaaaccagaatttgccaggtcccgtttaaccagagtaagagacagagcagctccacagtccatccccaacctaagacacttctctaagctttaactttcccagtggtaagacagagaattgcctgcttgaaacaagcacttgctttaatagcctcagatgcaatggtccaagaagacattagtgtgatgaattgctgtgcttcagggaaaagaagggttgtgtgtgtgtgtgtgtgtgtgtgtgtgtgttttaataaagactttgtatttttttttcagctttttttttcttcaaaatgtctactgtccacgaaatcctgtgcaagctcagcctggagggtgatgtaagtttatctaaactcactttgtgggatttcgcaaattgcacatctgttcaactgtgttacaatcttgctgtgtatacaaagaaaatggggcccataattcagtcattattaggcgtctccctagtgcctgggttcctcattgctttgactgttcttagcaattttatttgaaataaatgtcatggtgctaaaaccttttttggcatcgaatgagacttggacagcatctttgcaaggaactctttgctggaactgtgttttgttggacttttactgcatctgctttgatgtcatgctggttcttaatgtcaacccttgaggttttatttatcataagcttcaagcatgtcaaaaaacaattcttatgtctttttcttagaatatctgcagtattcttctaggcaaatggcttattattattaatattattattattaacccactgagttgagtcagtgctgcccatatgtgcatgggtctttgtctactggtctatggaacctattcatggccacatccccaaagagaagtgactctctctcaaagcaactgccaaccacgatagttcctcagttagagtggatggacctcagaagccttggcttttctgtttttaatctagcacccgggaaatcttttctctaaaataaatcagaatgtatatttttaaaagaattgaattatgtcattaatcctagggctttgttgttttcctcttgtctatctgggagctcagaattaaaatttgtcttttaaagaaccactcaaaagacagatgacaacttgggtcacgtgtacaagatcctctgtgttgtctgtggaacctgctctcataatgtgcaagtgaacgggcctgttcaaacacagactgtgtggaatattaaagcctctgatgttccctcatttaaagtccggaaccacacaccactggtgaatcccctacacaatggctcttgctcctgaaatgccccctcacagcctccctggtacaaacaacgagtggtgttgtcacatgctgatgacgttcaacctcagagcagctcctatagatagtcagctggctgtggggacatcagggatctctgagccagcccagcaacacaccattgggttcttagtaatgaagtgacacatggaagcaactgaggcacactcacaagcgtccctcaggataagctaggactctaagttcagagtcagacacctgttaatgggggccaaatggtaaagctggttcatatttatagttctgaaacaacacaaatgcattaacaaagttggtccttgcctcgtttccaggcatgaccaatctcgtaacataacattaccatctacaatgttcactgtagcagaattctagcagaacggttacatgtggcctgaatctggaatgatggcaccgaggatttggaagggggatgttaaatgagtagaagagagaacagatagagaagtcagccattagcttggggagtgggcagaggctcccatctatcagcccggaaaagtagttggctctgatgggcttccaaaaaggaaggactatttataagacaataaggaaaatgtgccagccctgtaagcagggggtatcctggagaaggcagggggagcactgaggaggtggaacagagaggaagaggaacttgtcacagtaaggaggatgtggcaccaaggtgggcattcacagcacagtgctggaggaagtcccttcccttgcacagctcagagagcatgcacattggacttctgattcatctgcctccactccccagtgctggagctaccctttccccgcccctacactgctgggggtcaaactcaaggcctcatgcagctgggacacacactctaccaactgacccacacccccagccccgcatccactgtttaaagagcaggagtctgggcagcacaggccggtagtgaaggctcggcagtgcacactcatcttccaggcatttccacagtttgaacttagttcaaattcttgctagaccactttctttctcttcagaaactcgactaggtactcatcccagatttccagcttggtgccctctgctctgaagctcccactacaaataaaatgcagaggggaggcacagcagcatgctctaaactagtggagcctttgaaggacagctctttgtagaagcaagtaaacttctcctcctcctcttcttccttttcttcctcctcttcctcttcctccttttcctcctcctcctcctcttcctcctcctcttcttcctcctcctcctcttcctcctcctcctccttctctcctccttctcctctttctctcctcctccttctcctctttccctcctcctcctcctcctcctttcttcttcttttggatatagtctcatgtagcccaaactgtcctcaaattcataatgtagcataggatgtctttgaacttctgatcctcctgtctctacctccagagtgttaggattacaggtgtgggctaccaagcccagtttatgtggttctgggaggtggaagtgagggcttagttatgctatgcaagccttccagctattgagctgcattcccaggatcaaaatgaaccttcttatatatatttttaaaaagacaactggtatgtgatggtctgtggacacctatttacttagtatgaaagaggttagaatcatgaagaggagtgagagcacagaatcgggtttcaaaagtgttgtttcagtgagagggtgtgcctggtttaatttgattgtatctgtgttctcattgcagcattctacacccccaagtgcctacgggtcagtcaaaccctacaccaacttcgatgctgagagggatgctctgaacattgagacagcagtcaagaccaaaggtaggcattgcgccttgtcaaggccttctccatgtcagggcggcctttgactcgtattgcagctgagtcacaaccaccggtgaaagtatcagatgcctttttcagtcaccaccacccccaccccaccctacactacatacgatctattttcttaaaacaactcctctttcactattggacacacctagattctgtggtttctcctttgtagaacataccctgcaagttaatagttaagtcatttgacaaagatggtgtcttttacaagcttagcacaaagggtgctttgtatccctgcatgagaaagctcttagcctactggaatgtaaagactgcacagatgaactctggccacagctgatactcacacattaataaaactcacacttcctggccttccccgagtcagcagaaaaacactgtagttccctaagccaagaaagtcctgaggctgagccatgggcctccacattcctgtgtgggcaggagtggctgacgtcatcaccaccatcatcatcttggtcgtctttaccaacatttattaagtgctcaccaggagcagatactgcattgagccgctctgaagcttcctgcttagccgaccctcagactgatttcagatgtcatgctgtgtcattcccaatttacatacggcacaactgagagctagctggttaacatgcttcatgtctgctggccttggttcttacttggagttggacatagttctgcgatgcagcagccagtggttaggattagactcattgacttagagcagcatctccaggagtgaaaaccagtgtgcagcctgatcctgctgccatcggatacccaccacagttgtggtccagcactagtgggggcatctgtgtctttttgccttcatcccacccaacccccatcacttagtgctccatgttgtccttgactttttgtgcctagtggttttagcgagtaacagttttcttaagtctgttcctctttacagtataagatttaacatgtaattattttacgtgtattttgcagatatttatctaccaatgttggcagtttaatatgctcattttaacattcattcaccttaaacttctcagttctgcagaaaaaaatgacaaataaaatcgagtatatcatatgttattatgacagttacaattttttacttaaaagggggaaaatcaaaggcattggtaattgaattatgaaattatgaattattgagtcttatgctttcaatatatattctgtttctgtgtttgccaaattatccatgatggctatggattgcctttctagacaggcagggcaaactcattaaaaacatgcccctgggggctggacagatggctgctgctaggagcactgactgctcttccagaggtcctgagttcaattcccagcaaccacatctatctgtaaataggatccaatgccctccctcttctggtatgcctgtgatagctacactgtacttacatacataaaataaataaataattcttttaaaaaatgcatgcccctgacatttcagataagtagcaccacttagataatgagctgacaggaatctggagtgattgagacactcccgagcaccttcgcctcagatcaggagcctgctttatcttgacatcaaaggaatcagaggtaaaccttgagtgtccgtagaaacacaaaccaagggctgaaggatggctgccagttccctgtggccttgcatctgatgcagaggtggtgagctgggctcttgcaggctagccagagcgaggaggggaggagcccggagccgattgcctggggctgaataattgctgtgaaatctgaggactgggtgtgggaggaggctcgactccagcgcagttaggaggggcagagtgcacagagatctggctctgcctggtaactcctctcccagcgcccgcctgtgagaactcacctttgggcattatggtggctctcttttaaacaggattgccctgctgcttcctcttctagcttcttctcctattccatacagtgccctaagccagcccttctcagccagaaagtctcgactcccacaggggtcacatatcagataccctgcgtatcatatagttacattatgattcctaacggtagcaaattacagttacaaagtagcaatgagatgattttattgtctgggggtcaccacaacatgagaagccgtgttaaagtgtcacagcatcaggaaggttgaggacctctgctaagcagatggtgggtgcctctgcctttgctactccagaggtgtggaactttttatccctgagtccctaacaattgccaagcatagctctactccaataccctccttccccacaccccagacatggtcttgcagtgtggctcaggctggcccaagcttttgatcgtcttccccctgtgtcctcaggactcccagtgtctacacctgtgtagggctgatcacctcagtgtctcctgggtttccacttcatgtctccaatctccttcttgtcacaatgctatacttactaacttctagatctttctttctttttttttttttacatggttttatttcttaaccttttataaatgcccagggccatgaggttgtgtgaggagattaaaccccccccacatagcattcaaaaggtgtacaggtgtcagagcacagaggaagcacagatgcacttctgggacggggagcacaggttcattacagggtctgggcgttgccagaaaagtgaatagtccctgtgagctttgccccaccttcaccagctgaatttagctccgacttgtgagccaacttcttccattctagtcggagggatagtgaatgtatcttcttgcatcaactaaacccagggcatggttgctttgtatttactctctggcccggaggtggacggtgcaataccttatgttaatttatgtctggttagaagctgagttaagtcatggaaaagtagtaatattgcttaattaacaagaggtttctgagacttgatccgtaggagtctcttggtctagattggccttgggttaaatatatactgtggagtgttcaacacagctggggatggtttaccatatgggtccaaataactagaaaggaaagtcagctaaattagaaaaggatgaatctcaactccatgaaatagatggtaattagcaacagcacagccctggagttagcactggtgccagtgaatctgagcagctttggcgcctgcagaggggagggctgggagttgctctattattgccagttttgatttgagcagtatttgtgttctccggaagggcgagcccccacccccacccctgcacccccgcttcttcatgagcaagcccaactatagaagtgagtttctgcacttcttttctcttaacattttaaaatagaaccacctaagattcccagcaaggctacaagaccactctcctcctatgcagcggagaagggcagaacgtctttcttgtaagattggggtgcctctgtgggctgcaccccataaagaagtccttcataactcattggcccagggccatattgttcgactagaagggaaactggccccactcttccctttgcagaggcctctcgcttgaggctccgggtcactttgcaaaccagccctcatctgacagctgttctcagagtcagaccctgttgagccttcacagctgctttaactcctgagcacagcattcctgtctaagagcattgtctgcatagctgtgcaggaaccaggtggctgcaaagcactggggagggagtgcccagggctctttcattgctggcttcattggctgcctctccctcctcagccctttcttttttctactgaggggatccaaaaaccagtttcacccacgaacgttggaagaaaccagattctaatctggcatctgcacggtgggctgagtgaagggtgagcctgcagggttccgttgttgcagctgttcaggtttttcctttcctgttctctgaggcaactagggtaccagggcataaaaaggtgcccacattgtacacatgttactccatttttgtttttttgtttttttgtttttatttctttgtgttttcctactggttctaggtggaattttagaaacacactagattattctctgagaattagaagggctttttttttttttttaattatttttaagtcagggtctcttgtattgcagaacttgccatgtagccacagatgactttaagtttctaatcctctggttcccacctcccaagtgctaggattacaaggatgtgccatgacacccagtttatgtggcaccaggttccaaactcaggacttacatgctagacaaccattctacctactgagttatacccccaagcctgggtttttagatgacaaatgcatcccataccgataacaaaggagactaggccttaggtcctatctaagaaacctagccgaggtgacatcagaacagatgggaatagaagtttgatctttgggctaaagtgctttcttgggtattccgttgagctaggccatccttgaactgggtctgtgtccctcaactatagcacacctgtcagaggcctgatgctcctcagcccctcccctgggtatccaattcttgtctcagctttcaggagtttctgttgttcacctggaaactgcactgttaacctcatgaaagctattagcaaacacggcctgggcttctctctgccctgtcttttcataggccaatagttgaatccaggcagtggctgggtctggggctgagaggccaagggagggacttgcctcccatcattcagtcagtcttttttgtgtcctagcaacataagtcttacgatggttcctgttttatatctgggaaagccaggtgcagagagagaagcattgaaccccaaggtcgtatatgcttgagtctcaggtacccttcagaatatcgcctcctctgcttacacagagacctcctgtattcggcactgtctcatcccggggccaaaatgccaaacaaaagcgagttaagggagagagggtttactctggctcatagtcggatagcccagccatagtgcaccaggcatggagcagagcgaggaatactggtgctcccctcacagtgctccattttccgtagtccaggacctccgccaatgggatggtgctgtccatatttacagtgggctttcccacctcagtcaaccctacctaggtaacccttcactagtcatgcatagaagtttgtctcctaggtgatttcagatcctgtcaagtcagtaataacaactatcacagtatccctgactccctggcccggtcctctctggcatactttaggcccttttgtgaagacagaggatttcttctaagccaaagatatcaaagatagccagcaatctgagctgtagtcctatcctcccgcccccaactagataaggcaattttccttttctttccaaccagacagctcccaccccgaggcctcttgagccctcatcagacagacagaatctactctatgtgcagtcagcatgtctctggtgttgtgaatcagcatcctgttccagagggttcttggttccctgccagagacagtggagacacgcattctccatggaatgccgaagtccagagcagaccaaggatttcagcccgcagagaggaagagagcaggggcgggctttgtgggtttggattcaatgcttgaaaccttttaatgcttgaaaaatatggtgggcagctgagaagactcagcccctcaaagtcactgctggaactcagctgtcagttatgcaaagacctccctcaggtagactctgcttagaacaatgatggaccttttttttttttaaccatgtcttcaattggaatattgaaaatatgcaggtgattagactagccaaccatcttcatccaaggacaacatgcttaactgcgaccctgcacccgtgtgtcactacatcttgggtcttagttgggcttaggccacttgacttctgtaaaatttgagtctgttggataagtttttacaaagatcacctgagtggggcccagcaggtaagaatgtttgctgctctcgcagaggactcaagtttggttcctagtacccaagttgagctattcacagccgcctgtagatgcagctgtaggggatctgtggacgctttcgtctggcccacagtctctttagatctcagatccttctacctagccagtccttccttaaatggggggaagtgagaagttggaaagaacccagtgcacggatgcagagccttacctgctaagcttctggagctaaccttgaaggcatggccgtcagtattgattacaatgcccacctggatggctgagtgtttgccccacctccttcatctgtagttagactgtggtggccaatggccgcttggtccctgcagcttcaagctatgctggatagttttccacaggaacaaactgtttcatccactgggacatcaggtcaaggaagcaatagtggtctaaagataatatcaccgggagagatggctcagaggttaagagcactgtctcttcttccaggggtcccaagttcaattcccagcaactgcacggtggctcacagccatttgtaatgagatctggtgtcttctactggattgcagtcatacatgcaggcagaatgatgtatacataataaataaatctttttttttaaagataatatcaccaatgggtattctggtgctttagcataggttatgccttatgtgccagctcaaggcacataagcccagagaatgctgggcttcttgagacatgccagcaactacctgtgacacagcactgatgcagatgagggtttagagggtttagggtccagagctgcccacttgtagaggatctctgttcagtttctctgcattgactgtcatcagcatgatactgcgaaacctttgacaaatctgcttctagatccagccttctacacagatccatccatattcctttgttggttttgcttgtttgtttttcgagacagggtttctttgtatagtccatacagctttaatctcagcaggcaggaggcaggaggcaggaggcaggaggcaggaggcaggaggcaggaggcaggaggcaggaggcaggaggcaggaggcaggaggcaggaggcaggaggcaggcagatttctgtgaatttgagaccagctgggtgaatccctgtctcaaaaccaaaaaccaccaaaaaactgaaaaaacaaacaaacaaaagcacaacaacaacaaaaaatcctcaaaaaagaataaaaataattcaccttgctttattttaaatgaccacatacatagcatagtattccagtgtgtggacaaaatgagattatgtaatcagtcccttattggacatacaagggtgataatccgtatcctcaaacccacctcagtgtctagcaatagggtattcacactgtattcacactgtattcacactgactactctaaaatctaagtggagtgctagacatttattagtacgtgaccccacttggaaatgagtacatgaatgttttaaagcatctttctttttatacccggaaattatcacgttgtaaatgcgcgtgaagcatcaggatgcttccactgtccaactgttcattgttctgccgcccaaacatcatagttctgagctccaagtgctttgggatgcctctgactttctgtaagacaagttgggtgcagtctgtaagtgaccttttgtgcttagggactctggaattgcccaccagtcatggcaaaggcttttccttttattgagcaaagttcatagtcagacagcggaaagctctcttgctgcctgaatcctcaaaactgagctttgctgagttaaatgacatgtgaggaatatttctgatataaaaattggaaactttcagatacctcgaaccttgcttatctttgtaaatacacatgttccaattaaaataggtactgaaacatttgggtggcacttcaaaactcccaatttagatttaatttagattaaagcacttattcttttttaatacagttgtaaaattgattattaaagtcacctattgaagattgaaagcacaggatgtatactttccttgtgagacaatctcatcttcaataagtgtggttctattaatcaattagctattaaaatataactgccatattaagcctgactcatttgtcatgacagctggtataattataaaaattatacctagccatttatacagccataatcttgcaataaatataaataattgtctctattaattcattttgaaggttctgtctattaattctccagttaagtggcaatttggggaccttcatttaaaatctttgttgttcgttccatctgactgccagagttccacacgtgtacctcccactgttgattttggaaaccaatttatgaataaaatagctttttaagtgcaaatatttaaagggttgaggcccaaggtccaaggctttctggggaagaaggtaatgagggtgcctgtgtttggtcaggaagagggatgagctagtcgtgacattctagtattgggttggggagagagtatgtggatttcactgtgtgaacgtctcctaaagcgtgtggtggggtaactgttcataacttgattctccacaggagtggatgaggtcaccattgtcaacatcctgacaaaccgcagcaatgtgcagaggcaggacattgccttcgcctatcagagaaggaccaaaaaggtactggaaccttagtgtggagggcaggccttgttgagttaatgttctcagatattgcctgttctgttcttaattaatatgtgtgtgtgtgtgtcccttgtttgtgttgccctgcataccgtagggtggcaggccctaaagcttccagatgattcccctgtcttcaatttctatcttgtcacagaaatgctggggataccacatctggcttttttttttttttttttttttttttttttttttttacatttagcaccattacctgctaacccattctccacccctaccccgtccaacattactttttctttttgtgagttgtggatcttctttaaccaaaaggatccttctagaactcttggatgtccaaggtttccctcttatatccttgagagggttgctgctttcataggtacagccgtgggaggtagaatggaaaggtgacatcctggaacacacgagggaggcattctggaatagacgacaaggaagagaagcaatggtcccacgggttatgtgctgactctgtcattgctgtgcttaggtagcaactcacttcctctcatggcttctctggcttcttcgtcagatgttgtgaatgtaatttcagaatggtttcctccactgggcgtgagtcctaacgtgtgcttctcatttacactgaggggctggggagacagctctgttggtaaagtgcttgtcacacaagcatgagtatctgagttcaatcttcagcatccacgttaaaagagctaaataccccagtgctagggacgctagataggattcctggggctccccagacagtcaatttagctgattcagagagctctaaatctcacacacacacacacacacacacacacacacacacacacagcttctttatcagattcatcgtggctgaagtgctgtggtccagcctgctatcttcaataggcttcgctcctagtgtttatggagttttctgtgtgtgttttccctttgctcgtccactcgtggctaaagcaggccccgtcttgtccaccttagtttcccacagcactaggacattttacctttaaggatatgctacttaatctctaacgctttgctattaaaagcttttgacttatattcggacagtgccatcagggtgacctcatgcggctcccgcctgacttgaggctttcactccccgctacagtagcattgacctgaaagaatgccaggagaaactgtgtgtccctggagttggcgtgaccaccaggtcctgggagttccaggtcaagcctggctgaagctctgtcctccgtgctccaaagcagttgggaaaggacgtaaatgggaaagcagctagctcccttcatcccacatgcattacaattctcctttcacgggatgacgtgtgttaatcttctgcagtgaggctcagaagggagtgttttatgtctctggctgtcccaaaggatctgagagctgcaagagccaagttcccgttggaacaggagatccactattctggactgaaggaaataactgctcattcagtgtggccttggaactgtgtgtgcacactgagcttggcttcatgttaggtagctggagaacgcagatcctgcagagcctgttggagtaaacacattattagaatcatgagaagggtcagcaaacacacaggcattagcgcgtgctaaggacagcccactgccctgatgatacttaatggtccagggtgattatctgtcacaggaagatgccgcaactgcctgaggtaattttctaaaaggacgtcctagtattgttttaggtgcactgtttgtcaagactggtctgcagcagtggttcacagtctgtgggtcatgatctctttcaggggttgagcaaccctttcacaggactcgcctaagaccaccggaaaacagatgtttacctgatgactcagagtagcagcaaacacacagttatgaagtagcaacaaaaatacttttgtggctgggatcaccgtggcctttctgaccaggacaaagaaccctattaaagggttgcagcactaggaaggttgcgaaccactggtctagagggacagagggaccctgcccaggtggtgagctgctgcagatactgtcacagctagtaaaagagggacacagggaggaagtttgcattttatgctttgtcccttcaaactagtgctagacacaaggtttctctatgcagagaacagttgttgttctattgatcccttctgggatttttatttgtgctgagtcctatactgggcattctgagcaattcaagtcaaagtggaaaaatccagtaggtgccccagatgtcccctgaggtgagagcagagatgggggtgggggcgggagggggagtgtcaaggacagaccaagttgggagtcacttaacctcagggttccaatttggaaagctggtgttataattggtatgtgttgttttagaaagaccttcctacctcccatgcatggttagggcatcagcagccagaaggaggaggtgaatgggctgggcctaatgcttgttcgcatccatgccaggtctgactttcttgacacttgctgtatgttacctttagaggcttgtggagcctcagaaattgttggccagccagcctacagggccaagttccaggccaacaagagaccttatctcaatcagaaagtggagggcacctgaggaatgacaactaagcttgttctgtgaccttaacccgcatatgctcctacacacacacacacacacacacacatgcaacacgcacaccccacataaaaataaatgcagttcagttcagtgcagctgtggcctagtccattcccatggctggtgagtatccagtcgccgaggaaatatctttaagagccaccctgaattaaggatatctgtctacatatctgagtgctgcctcagacctccgactttattaaaattgtgtgttcatgatgatagtggcgtgatgatgacactgtccaacaggaagttgaaagggactctgaggggctggagttcacatcatattcatcaccgccccaacctggaggagatgggagatggctcagggcgaggtgcggtgttttacatagggaaagctcagcaccctcccccccacccccggcctcgctagcacagctagctccaggctacaaggtcccaccctagagcagcatcacaaacgccttccctgggacctctatagacctgcaggactccactggtctttctacctcacttcttttcagcttgacttggaaatctccctgagactccactcttagctctcctctcaggagctatcagctacagctacctagtgatcagcctgggtgttagtggattcccttaccatgtggtttctgccctcctggtctgatgtaggggacgaggaagttctccccaaacggcagagtggtcaaagactcacacacagcctgcttttcagagagagccatcttatttctgtctcgctggttccagagtggacgttggttccaagcagctctgagacatctcccttttacaggagctcccgtcagcgctgaagtcagccttatctggccacctggagacggtgattttgggcctattgaagacacctgcccagtatgatgcttcggaactaaaagcttccatgaaggtaaacacgtgtggggtgtcatccgtcaacctgcccattagcgtctgtgaattacagccttttgagtgtaactaggtgattgtcagttgtgttggagtcttatttgaagtcatttccccccaatgctataagttgtcaggatttgaaccaaaaatatttcaatctctctcttttttaacgacggcaaagaaatttcctgatgcttagcagcttagtgatggttagcagctgctgagactcggcacctgggcgattggaatgcctcttgggaaaactgcttccttgattacacttcctttttaaggaggatatgtgtggtattaaggagaaagaaaaacagcttttgttcagtaaagcttgcagattctgcccatgccctcctggatgctgcttcctctggcttccccctgcccccccccaatccgttgctgggccaaaatttggatttggtccaaaaatcagcaatgcagtgcaggtgagggtcgatatcagggtgggactggcacctgaatccaatgggaagtttctgcaggacataatattgttatctaagttttgattttgcaaagctattttgaacatgggaattgaggttaaattagtaaattctagtttagaaacgtccttggattttgtgctcacctaagctacccaatattactcaaatgtaagagatagacaaatgtctgccacagcaaagctcagggccccttctctgtgtacttgtgacatgttggataatctgaggctgccctctgctggtactttttggtaaggcatcttcaatgaggggaagctgtatgtcaccctgttgggttgtcatcctttctggagaacacactaggaatgaggccccttcacacatagagtaccaccagaaccctggaactgatagcccagagccactgtaggatttgtcaaatctctctctgtctcttttttagttcatcagcatagctcaagtggcatcctaggcaggctgtactgcagaggaggtaccagtcagtgccgtgacacaccaggcacagggtgcaggctaataatcctagcactccagaagtggaggcagggggatcaaaagctcaaggaagtttaaggccagggtgggatatctgagaccttgtctagagagagagagagagagagagagagagagagaagaagaagaagaaggagaaggagaaggagaaggagaaggagaaggagaaggagaaggagaagaagaagaagaagaagaagaagaagaagaagaagaagaagaagaaagaagaaaaggagagtgtactttcatgccaacaacagctttgatgatagtagcattcctgagattgccaagcctttgggccattggggtcatgtgtaagccaattttttcccaggtttctttaactatcaacacttggatcagttcatcttatttttgtcaagaatccacttagttgagatttatgtgatttcactggtatctatggtcgggtattattgacttaaagcagacctgtgtgagctgtcagtcactccactaatccaagtaactgggtccaatgaaaggcgctttaactgcaccatctttgaccagacgccagctcttccattagctatcatggttgagtgactcttccgaagatcttcaagtgacgttagcaaaaatgatgctttcaaaaaaaatctgttttcacatcgggcaataccagtggcagtgttttgccgtatgtcacaggagaggttggccctgtgataagaattattcttaagctgtggaaagcttgggccaagttttagaaattgccaaggtcacctttgaaagtggagataaagccctattagacttctccgatgtgtgggcgatggaaggcgagatactgtgctcggctcactttccctcggtgtcaggacccagcatttcttctgacacatgagttagactttatttctgtcatctttgaaaagcctgcctctccctggaaatactcagagatgctccgtgaccatctcagcacaccccttgagaggttcagagtgctatgtagacctttggctaacaagggaaggatttggggtttcactggaacctgtgaaaaaaactatgattaaaatcctggggagaagagtcaaagattagattaagactaagattcaaaattaactattaacccggggcttagcttagattatacaaggcacattttaaaggggcatctactctctaataagtttaattaatagctgacacacttttcatgtgggtaagtacctttcttattgtattaacaccttataattgatttacatttatacagttgtaattctacttagttcaaagtggtacctctatattcgcaaagacatgtactagaagacccttgttattaagtcttgactttgatcaggaagccagctttgaaatacacgtttcattgagtcctttcaagctccctagcacgctcaaaagtgtatatattaaattcaaatatcccactcattaaactctcatttcctaataaagtgctagcctctaggcttatttggcacttttgttattccttcttcctaaatacccgaaaagtgcagagtaatcaagcaaaaatggaagtaacaggatgcatttttttaaaacactaagccatttttgcgtttcaaagaagagaggcgaattttcatcctaactagcacctttccgctaaggagatgttctaatctgtggcagctgctgacagcggccccacaccacttcttggtcaatgaagacaactatttcctgtttattaaaatggtgggtggttgagataggaactaagaaagacagatatcgagtcggaaccccgtggcctcctctggtgctcagggatagatactacaaggctgtctcttctcattcgtttttcaaaaacatagtagaatatagatgttctgcttacaacatcttggaatctggtgatgtgaaaaagaaaagaaaagaagagaaaagagaagaaaagagaagaaaagaaaagaaaagaaaagaaaagaagaaaagaaaagaagcagctttatgtagtgtttgaggagcagagcacaggctgctcaggaggggcgaccctgacggagccatctgtttgctctttacttgacggaggccagcctcgagggaggctgaggtgagggaggctgctgatgtctgggtgtcttgcttcccagggcctggggactgacgaggactccctcattgagatcatctgctcacgaaccaaccaggagctgcaagagatcaacagagtgtacaaggaaagtgagtagcctgcttctgagacccaccctcttagcccagagcgtttgtgcatccccgtgcgcactcttgcatgcgtgctcccgtgcatgcttgcgttcatgagtatgaagagaagggtcaacctcaggtggtgttctcgggagccatccacctgcattttgacaatgttctcgctaagcctggagcataccaattagtcgaggctggctggctagtgagtcctgggatgcccttgcttctgcctccacagcactggggtttcaagcacacacttagcacattaggcacagtcgtggaggtcagaggacaaccctcaaggctgcggattctatccttctactgtgagggggtccggtgcctggaactcaggtcatcagatgcggctgtaagcacttttatctactgagccatcttagcagcttgagaaacaatattttagtcagagacaagttcgctgattaaagagaacccggggacccctgggtttgacttaggcttgtttgtcccttagactgacagtcaccctagatttgatctcctgtgagtagacccccttctagaaactccatcctcagttggggactcaggctatttctacactaaacaacaatgcctgcgttttgaaacttggtgggtgacagacccgttgtagtgggtgcttgggtgcttgggtgtgcctgcggggggcatcaagccagatgtgttgtctcctcagtgtacaagactgatctggagaaggacatcatctctgacacatctggagacttccgaaagctgatggtcgcccttgcaaaggttggtctccctccctccctccctccccttgcctccttccacagcaggctcagctccttctatactggggagggaattaactaaatccttgtgcctgctcagaaattccgctgcactcccgtctctgcagaactgtcatatttgttaataggatttcttatcctgcagaaccctgtggacaactggacgcggggccaggggaggggtgggcagctcccaagctctggcctggatttctgtgctaacctgcaccgagtgactaaaggaaggtcactttgcctctatttgtggccacagcggacgcattaaagtgacctcactcctttcacctttcgcttgtgtgcgcgcacatgcaaaccttgcctcactagtcctttggcatatgtgtgggtctttgaggcactttgctaacattaccacattaatgtggatgtaaggaatgtctcccgtgaatctctagttccggccggcatgcacctaaacaccagtctctcaagggaagggaattctctcagggagccctgtggcaagtgactgaggagtgtgttgcagcctggcccacttgcatctccatgacagtgacaactctgtgactctcctgtcttcatttgctccccatccaggcactgcagactctgggtcttttttagaatctacttgtatcttgcttctttgaccaaaacccatagcttctataccctttcagaaagctccaccaccttcaccctgggcctgggaacccccatcttcatcactgtgtttctttccttcttctctgtgatgaccttgggtgttgtaccactcacctgtagacctgttccccttctgcctgtgaatgcagagtgcccctggccaccaccaaactgccagtccctgagggttcagctcaggccccgtcctagcacttctgggctcagcctactgtttactacaatagctcttcccttcatttgcatactgcatcatcacggcactctcagttgccatgagtctcaccattatacacagcttgacggatgagacttaaatgggctcagcttctctgggacatgggtcagggaattcagtaagatgctcactcaggctagcgtacccagggttggctaacaatggtgagacagagcttacccacttccttccctgaccatctctttcttcgttggccttgtctagattaacatgtgaaatgctgtattcatttgggaatgaggttatggctcacccggggtggagaggaaactgatggtccttgtttttttgttttttgttttccctgcctccagttttagaatgcaccaagagctaggtctgatggtccttcttgtttttcccctacagggcagacgagcagaggatggctcagttattgactacgagctgattgaccaggatgcccgggtatgtgccaagcttcatggcgtgtgtatttggaggggttgtatctcacacaactatttctttatgtacaatgaataacctcaaactaacatttgttatctctcagatcctctgggtcagggatggagactgggttgatcagataattctggctcaaggtctctcatatggttgtagacaagacaagttggttaggactgtaattactgagagcatggccaggtcaaagggttctttcccacgtggctcatgtgtgacttactgttggcaagagatgttagcactcctccacgtaggcctccacgggctgcttgaatgtccctgatgacattgccgctgccctccctagagcgagtgatccaagagggatccagaagccctcatgctcttatgactccgtctcaggtgtcacacattcttgtcatattctgatcattagaagtgtgtccatgaatccagcccacagccgtgggaggggtaaaactaagtgatgtcccttctaagggaggaatgggccttttaaagcctcagcccatctgagaatatgaggtttgtttccaggaaccgtagttgtaatgccagggtcagttaccagctctgtacccacttcccgttggctcattcaggctctgattccacagacgtgctaggtcctgacactaagctggtagggaagccggagcagatgaggtaggcacaccaggctaggaaggctccctgctccactcagtggggacaggggcccgtggcttcctcataaagctaatttagacagctgcaaactaggtatgcctcacccagaggggtcagctgtttggttatcttttagcaagcaagtcataatagctgcagacaaaatcatgcacctccactttaatatagtctggggagtactcaagtataagagaaaggtttttaacacgtgctacaagtaggctttgtggtctagggagatagctcagcgtggccccagaagccagaacttgagcacacctgttctaagtggcgcattgtgggttacgcctgcagtatgagctcgtgtgctcacttgtctcttggaatgggcttttaaagtaacatttgctaggggtgggtgtggttaacttctggttggctgcatctctgctaggggtgtgtggttaacttctcctggttggctgcatctctgctaggggtgtgtggttaacttctggttggctgcatctcccacaggagctctatgatgccggggtgaagaggaaaggaaccgacgtccccaagtggatcagcatcatgactgagcgcagtgtgtgccacctccagaaaggtgggtgccgtgccagcgaggcctcggggcctggaggctctcaggtggcgaaggctgcaccgaggagcagatagatctccagaacaacacctgttctccacgcagatctttcagtttcctttatcaaatcacttggcctcctatctcactgtgaaccctctgtccccaaatatgttcaatatttgatatgttagttgtttcactgtgtgtgtgtatgtgtgtgtgttcacatggatgtatttgtatttgattgtgcatatgggagccagaggtaaaccttaggtgtcacacctttggaaccgttcaccctggggtggtttttgtttgtctggtttgtcttttagactcattgcccttgaattaaaaaagtaggctaggcaacctggacagaagagagctgctatccacccgcctcagccttcacagcgctgggattgcaagcacaccaagcacaccatcgtgtttcgcttttttgttttgttttgattttgattttcaaatcatgggttttgggtttgggggctaaacacagggccttctggttggttgtaagacaagcatgttgccaaccgagccgtctccctgggcttcccctgttccccttcttactagaggatcctttgttcttgccacgattgttgaagtacaggacataaccacccggctcttactgtttcacatgacatccacatagatggattccagtgagagagcatagagatggtcacattctgtggcctaggcagagccattagggacaggagctagacctgggtcctctggcaagacaggtacaaatcagctctggtccaccaaggtgacctccagcccctagatgaccgcctacccctaggatgcatcaggaatcacctttagttgttggttgttttatttttgttgctgctgttgtttaatcaaagtgtctaattacatagatcatgcatgcagctttgactagcacttctgatatcatttgttgcttttcttagtgttcgaaaggtacaagagctacagcccttatgacatgctggagagcatcaagaaagaggtcaaaggggacctggagaacgccttcctgaacctgggtgagcaagtatggcccttcctccctggcagggaggacagaaacaggaggaaggaatggctgtgtgcttgcttcaaggggacttgagaggtgtggtggcttttctgcatgtcttggagagttttaggattgactgtagatttaaagatatgaaatgggcttaaattgccaggaagggctaagttgggtggagaagggagggctatactgggcaagcttacatagacacccggtcgtcagtgacctctgcacctcgtggttgaaggtaccgcagtgggtagagcctgctagttcacaagattctgagttccccttagccttctacagcctttgtccatggacgggcccattctggtcagtgtcttagggccaggcgggcagccctgacctctgtctccttcccacagtccagtgcatccagaacaagcccctgtacttcgctgaccggctgtacgactccatgaaggtaaggactgctggcccagaggctccatttccactaagctccacctctgttttggctcaaactgaatctctgtgactagtgtttagggcagtggttctcagtcttccagttgcagcaaccctttaatacagttcctcatgttgtggtggcccctaaccataggttatttggttgctacttcagaactggacttttgctatagttatgaattgcaatgtaaatatctgaaacgcaggatacctggtatgcaacccctaaggggttgagacccacaggttggtaagcactagtttagaggatgggttcccactagctagctgagattgtatttggcaggtgagaaagcaccattccatcttctctcagttgtttaaatacatgcgatgcagctccagaataaggtgtcactggagggaaagggtaaggtgacaacggtgtctgatttctgctggggctttcagctatggtgtcccattagtcccaggataaaagcaaacaggatgtgagtgaccatcagcaggcactacacaacagcttttcagttccctcccttaagtcctggcaggaaaccctgcagggcgtccatttttatcttcttgataaagaaggcaggcagagcgcctggagccaaggccagctttgcagatgcacagctgggtgatcttcctgcatgagctgccccggacgagccttgttctggttctcgtcctgccaggactggtctgctttccaggaccctgatttcttctctggagcaccccccctccgccccccgtgtccatgctgaccctctgcctgctctccttgggctccctgttacagatagtttccttagtgcaggctatttcatgcattcacaaagagccataagaacagcgtgccgacccatcctctctgcacccctaagtgtccaccagccctttgctgcatatgcaaacttgcaggctggcggtcagaagcagagctgactggagaggcggctcagcagttaagagcacacactgctcctgcagaggcccccttggcttctcagcatctagtttgaatcattcataggctcctgaaacttcagctacaggagatctgatgccctcttctggcctccgtgtgcacctacatgtacacctatgggctcccccagacacatacttagaaatttttaaataaatcttgaaacattcagatgtgcttggaaatctaaggtgctcatcttcattaaggaaacagtctcagcactgcatttttaagtcttgtaagatcacgacccacatgagtgcaggcattaaacaagctggctgctgttgtcgaaatcctggtttggctcccagttccaggctggacagcaagcaaccatctggaatgccagctttaggggatctgacactcttttctggactccagagggcttccctagacacacacacacacacacacacacacacacacacacacacgagccagaaaaaactgtggtgggtgcttttttaatgataaccttgtcaaggaacttaactctgatcatcactttgactttcagggcaaggggactcgagacaaggtcctgattagaatcatggtctctcgcagtgaagtggacatgctgaaaatcagatctgaattcaagaggaaatatggcaagtccctgtactactacatccaggtaaagcctgtggcatggacctggctctgccaggcatggtgtgtgtgtgtataactatgtgggtgtgtatatgtgtgtgtacatgtgtgtgtgcatgcatgtgcatctgcattgcatgtgtgcatgcatgtgtgtatgactatgtgggtgtgtatatgtgtatgtgcatgtgtgtgtgtgtgtgtgtgtgtgtgtgtgtgcatgtgtgtgtgtgtgtgtgtgtgcaggtggctgtagagaacaatggcagagtggagaccttcctgttttctcatttcgtagagaatagactctgggcaccaagaatcagggatttatattgaaagtagcctatatgattttcgtaggctcataggttcaaagcaggtttatacatttcccacaagtgtcactctacagtggtcataggtgtttatagtgacgatcctgcatgacctggtgacaatcagagggactctgaaggccaaaggcgttttgtattctataatgctcctgcttcctgaagatcctcagagaggcctgacaatttgtctcttgccaacccacctcttctgtgaacttagtgtctgcattttggaatgctggagccttcctggtgttaacactgtgctcagctgccaggagtgttactctggggatggagcctaggccttgcatatgctaagtaagccctctaccactgagctagcaaccacagctttttaaacttttttgggtggtggtagtatgtgtattgtctgggtgtgggtgtgcatgtgtgtgtgcaggccagcggtcaacctctggagtcattcctcaggaactgtccaccttgtttgctgagacaggatttctgactgagagtcgggactcagtgactgaatgaggctggctgggtggtgaaccccagagatcctcctgtctctgcttctcagtgcgggtgacattgcacgtcaccagccctggcttcttaaagtggggaattgaactcaggtccccatgcttgtgtggaaagcgttttgcagattaaactttctcccaacccctccttcttctctttgagaagggttctcactaagatgtctgagctggccttgaacttgtgattctcctgcctcatcctcctagttagctaagcttataggtgtgcattaccaggcttggctgcaatcccctttctaaaagatcctgacatttctatatctatcttggtctatggtcaccaaggacaatttgtgtgtgtgtgtgtgtgtgtgtgtgtgtgtgtgtgtgtgtgtgtgtgttttgggggggtcagtgcagccatgcttcttagggcacacgattaaagccagggacagctaagctgttagaaattatttctccacgtcactagttattttcatgcatccttaaagtccacaaaacttcaaagggaggcagccaaggttctaccctgtcctgtgcagaagggcgcaggtgcaggagaaactcgggcctgctgcagaaggccctgcaggacctgcagtgtgggagacattctctgccctccctcgcagtcctgacagggtgacgtaccatttcccactgcgcttcagagggccagggctttggtccactgtgcaggcctgcaagtccccagggcacaccaaggctatggcgggttgctgtacaatctatttttttttcttctgacactacttttctttctttctggccactgcagcaagacaccaagggtgactaccagaaggcactgctgtacctgtgtggtggggatgactgaagggctcagcacagtggatcacccagaagtggctctacctgtgccccaacctggcgttctagagacttcgctctccactaatggacccctgagctcctccctgtgaggatgatgacagggctgccgaccctttccccatcttagctgcccttgcctggctttctcctcattctctcctttatgccaaagaagtgaacattccagggagtggggcgtagcgtctgtgacatgagacacttcctcttatgtactgtgtcgtgaataaaccgtttttactttagaaacaagaatgccgttgcctttgctttcaagccactgttcagaaagcagacatacttgggatttgattgttcgcccagggaggttgcccctagaggatgaaagttctagaacttatctcttccctctggtagccactatacagatgcacttttttaaaaggatgagtgaatttaaaattatatacagttcaaattttaccccttaggcaagggctacagctcttatctgtgtgtgtacttctccttggggacagcaaatgttttattcacccagatgaacgctgacaacacaccagagaaatgattccaccgcagtctaacttggtgaacaaatgggcttacagagagttacttaagagaagagaacctcggttgagggttacttgaagaggcctgggaaacttcaccactgaataaaatgtccctgtccctcccaggaagtatatgtcttatgtatcctcaagtcgggttagggtgggcaataaacttcttcccgcactcatgacgtaacccactaatggtgagtataccctggggggaggggtctcacaagccccttcttgcttcatgttgtgtgactgagtgggtatcacagctactgagatttcaagtgggcaaaggtcctgccatgtttggaagatagtgtcctataacacatgagtacagggccgtagcaccacacaaaagaaaaaaaaaattcatcgcttcagtcactctatttttttttttttttttttttttggtttttcgagacagggtttctctgtgtagccctggctgtcctggaactcactctgtagaccaggctggcctcaaactcagaaatccgcctgcctctgcctcctgagtgctagaattaaaggcgtgcaccaccacgcccggccactctatatttcttaagctcagtccccacttctggtgggaaaagaatacctggactctaatggaagtttcttttggatgatccacatgctatacatgagagggccagggcaaggtcccagggactcttctgcgggcaaggtagatgaaagcgagtatctggggtggccacaaactggggagaagtctaaggtaggatgagatattttgggttttctttgtcagggtgggtttacaggtttggtttttgctacctttgagagatttatttttatttttaatgccgtatgtgcgcctgtgtgtatgtatgatgtgcacatgagtgtaggtacctgaagtgaccacaagagggcatcagatcacctgggctggagttaaaggcagttgtgagggatggttcacacttacgtactagaaactgaactcagaacctcagcaaaagcagtacgtgctcttaacctcggagccatctctccagtctcttgtatgtatgtatgtatgtatgtatgtatgtatgtatgaatgtatgtatgtattttatagagtctcaagtagttcaggaagcctcatgtgacctcacactcactatgtagctgagggtgactttctgcctccaattcccaagtgctggaattataggcatgtgtcaccatgactggaaattgaacccagggcttcatatatgctagtgggcactctactactgaactaagtccccagcctggattctgtagccagtgttgcaaatgtctctggtagtcattagacttataaaatacattgcatctaatcccaacctcgagagcctgcctgccagtgagtcaggctacagcaagcatgctcagatagccgggctaggccaaccacagtggattgggaacacaggaaggaaggacacttctttatggagaggtctgaggtaggtgagagcaaggaggaaacatatctgtgtaaagtctgtggtgagtctttacatctgggaggaggcccgccatcgagatcccagtggctcatccattgatggacatgctagtcatacaattggtaaaagattcaactgcagcctactaagtggttcatttcttctgccccttgagaaagtcaatgactcaagagaccaggtgagtggcactattaggaagtgtggccttgttggaatgtgtgtgtcactgtgggtatgggcctcactctagctgcctggaagccagtattctgctagccacctttgtatgaagatgtagaactctcagctcctcccacaccatgcctgcctggatgctgccatgttcctgccttgatgatactgggctgaacctctgaacctgtaagccagccccaattaaatgttgtcctttataagacttgccttggtcatggtgtctgttcatagcaataaaaccctaagatagccagggtcctctagattctagagagcagttctcaacctgtgggttgagatctgtgtgtgtgtgtgtgtgtgtgtgtgtgtgtgtgtgtgatcaaaagacccttttacaggagttgcagttcagatatctgcatattagatatttacattatgattcataagtgtcaaaattactatgaatagaaacaaaataattttatgtttgggagtcaaccacaacataaagaactatatttaagggtcacagcattagaaaggttgagaaccactggtctagaaggacagaactgatagaatgaatttatataaaaaacaaaatgtaaagatttattaaaacagcttacagaatagggtcaaaataatccaacaatggttgtctcacacctgaaagatccaaaacttggtggttgttcaatctccatgactggatgtttcagcagccccagtatggcactaaaggcctggagggtttctggaaagctgctgggcattagttggaagtctggaaaaatggacttagggattaccatcaccatcaccaccacagcagcattatcaccatcaccatcaccgtcactgtcaccagaagcagcagtagcagcagtagtagtagtagtagtagcagcagcagcagcattatcaccatcaccatcaccaccagctgcagcagcaccagcagcattatcaccatcaccaccagcagcagcagcagcagcaccatcaccatcaccaacagcagcattatcaccatcactaccagcatcagcagcagcatcaccagcagcattggggtaaactgactctacaagggccaaacagcaaaaagctgataaccttccttctcccatatcctttttggtctgggctgctaccagaaggtgctgcccacatctggaccttctcacatccattaaaacaatcaagagaatcctctaccgatcccaacatgtcaacctgatatagatgacttctaaattgatactcttgctcagctgagtctaagttgggcaagttgacttttaaaaccatcaaactcccatactgggaatcaaacccagagcttcatgcatgctaagcaaacactctaccactgacccactgagctacctacctaccaggttctcttcctaagtccttagtgctatgtctttgagtccctgtcatggcattgagctttcactcatggaaggctgtaggtgtctacagcccaaagttcaagagaagacaaacaggtgcaaagacagacgtcaaaaacatcttcctcgtgttcccatcaccttctgcaggccttagtaagagtccccgggaagtaagctaggtacttgtcataaccagccctgctctctacacaaggttagtgggtggcaagtgatgttttgtttagctgtatggccttcaacactgatggagttctaaaatttatttttaagctttatacatgtatatagtttatgttgaacacattctttctcatgcttcctccaggccacctgccccctactgatcgatcccctttacccccctagaaagtgttacatctactttagtctaacacacacacacacacacacacacacacacacacacacacacacacaaatttttttgtgtgtgaatgtataaaatctaggagtcacaaatgagagaaaaccattaatgcttgaataaaaaaatatgacatttgtcttttctgcaactggtttggtttacttaatatgatcatctctgcttgtgttcattttcctgcaaatacatggctctttttttttttctttttatgactcaaaaaaaaaaagtcaccgtgtccacaaaccacattcccttctctgtccccctcttgctggacacctaggttattttcgtactctccccactgggattagcgctgatgtgtaagcgtctctggacgacactggcttgaagtctttggggtgaatccccaagagtggtgtagctggggtattgttaatatttatggggagcctccttattgtctttcatgatgactccgggctagtttacaatcccaccagcccagataagtgatttttgagtgattcgagaacaaataaagtgcatttatttagacttggccttggcaacgcaattgtaatacaatgaggattcagtgtgaccctgatcctccgtctggccggtcagtggccttccctagggcccctggtctttggcaggtccttgcatgaatggactgtgtaaagataagcatgcgtgtttctatatcatcacctgtgttcatacatgtgaataccctgggtgtaggctgctggccccaggtcctgttgacagcagcttatatcagtaccttccccaagctgaattgtggtcccctcccaaacccctcactacacttttctatcaggagacttttctatctgccaaaggttgtgctcaaatagtcttcaggtgttaaccaggcacagaatgtgtgcctgagatgagcccgggacagatgtggggagtctggaaatacagaaattcaaatgcagttaaagcaaagatagcagcagcagtgttgaacaagctgagtgtgactgactgccttgctatgatgacccttgggcaaacttgagatggaaattcagatggagtgtggctcctgggtcatgcagggcccataatgcatcagaatgctactaaggtgccttaccaataacgggctgtttaatcaaataatctcccagcacattagaatcagtgctccgaatccccaaatccacttatccgtgtgcttgggggcagagttcaaggaactgcataagaagtgggacctctctctttaaccccgaattatcgtgctgaactgcaagttcaaagagctgggcagaggctgccagggcagtgtttctgcccaagtttgaagcttgctttactctctccagaaaatgagcctcagggttcagggtggaggagggcgaggcagcaagatgaaggggaaatcagactcagagagacgggaagagcccagcctcttatctgttggccctgatcctcccacaggtgtgaggaaaaaccccaaaaggcaagctgatgaggaaggactcttgaaaacgggtcaggacctgcttgctgccttcttttgtgagttgtggttgtccagtgtgtttcagaatcccaaggccattggaattccatctcaatgtcttccagattcctgcccattctcctcaatgtgtccaaagcttctcttgaagctaaggccgtggtctgggagactggcacactctcaaacaattttgttttgcaaagagacagaaagagatgtcagacaggttttagtattttgtcacctgatcacaaccaaaagtctaactttattctttgaggcataaagggccgcggatgtggcaggtaaccatgaaaggtgtcacactctgaccatgcacaggaggttttccccctgacctgtatgtgagttaggatggtcatgtggcacaacgtaacatgctttgcacattgaaaccatttacatgtatccacttcacccatgtgcttgtataaaacttgagtgtccagacatggtgggtctatactgtgtttcccagggcatgtatgaaatggaattgtctgttagggtttgttgttgttgtttgtttgtttgtttgttttgttttggaagtaggctttcatattaagaagcaagaaaccaaggcaagggatgggcatcagctggtaggtgattgctggagcatgcatgaagccccgggcttgattcctagtaattccgacattgggcatggttgtgcatctattatgccagcacttaggaggtaggaacaggggaattggaagtccaagattatccccagcttcatggagatgaaggcaagcctgggctaaaaattaaataaaataataagataaataaaaagagggaaatcttaattggaagctgaagggaagaccccaaaggtcccatatccccttggcttgattactggacagtggagaaatgatgatgtgtaagaatcttcctcagaagatgacgtttccagcatgcaaattattagtagccagagctaaagcaggggaaaccaggcttacaaagtagctagttacatttagcaagaaaaatgatttgaggacaaaaatcctttagatcaatcttgagccttccaaggacgccagcgtctagacttctcctcagggcttgataagtggcttgtttctttgcctcctttttctatcgatgattgagatgaaaactctggtgccagggagaaacagggaggggtggggagggacacactgaaggggaagagagagaaaggggaagaggaaagggagaaattgaaacatctcctagcaatgaggcagaacacgctgcagccaccaagtcctaactgttcattctatttattgagaaaagcctgaggcctgatttctttcactcccgtacgtttgagtaagcaaagtttatagagatgacttatctcattgcgttagaagggtgacttgctatctcagcatctataagcaatctgaaccgatgttgctgggtgaagaaaggcttttgtaaatatatgtgaaagatgccatctcgttgggtgttaagttggaggtacccaggaaaaaaatattacatttgtgcattcaattagctttctgtggaaagactgaagcatcctttgtgtcagcaggtttcctgtgtgtgagagaagcccactcgtcccctctaatgccctcttttgcattcgtgccagtccacgccatgcgttcctaatcagaatgtgtagctcagttcttcacactagagtgagaggtgtgagtaagccagcagccactctgtatgggtatcctgacggtggtgcacatgggtgtggagagccttctgctgcattcagttctgagcaaaactggggggcatcatcaggagtggatgtgaggcctctcaacctacttcctggatgctctccttctggggtcatcaggatgctgtgtaagcatatatagatataggtatttatgtatatatgtatatgatgtatatgtgtatatacacatctccaggatagcctgcactatactgagactctgtctcaaaaaccaataagaagagaaggagctgggattatgtccctgaggtagatcacttgccaaaggtttataaggacctaggtttgatccctggttctaaaacaaagaacaaataccaacaccactactatctgcttttggtttggtttgtgttggatgctctattctagtttcattggtgttgcagtgataaaatacccagatgaaaagcaagtaagggataaaagggttttattcaaccatacaactccaggttataggccaacgtggttaggaaatcaagacaggaacttcaaaatgataatcatgtcatgctgagttgagagcagagagcaatggatgtacacatgcctactcacttggtcattcgttctctgcttgctttctctacttttacactgttctgaaaccatctacctaggggatgatgcttcccagagtgggctgggtcttcccacactgattagtgaaattagtgaaattccataacagacatacccacagacccttgcatataatgtcttactgagactctcttccccagatgattttaggttgtatcagttgatgattaaaattaaccatcacatagctgaacacctttcccagaggcaaatttacatggttggccttattttgaaactctagtgaaagcacagtctttaattaatgggatatgaagaaatagaggaaggtcagggtacaagagggctttcttggcctcctaaaaccacaatgaagtaatttgctttgtatagccgtgtatcactcaatggctgaactgttgaatttagttacttcagtcactgctgtgacaaatatagaagttaaaagaacaggggattgtgggatggcacactggcaggagtgtggggcagctggcaacagagagacacagagaggaagagacagaaagagagacagcaaatgtgaatgctggtgctcagctcgatttttcctagtcagtagaatgttccagcctagggaatggtgccacccaaattttagagtgccacctacttcaatgaacttaatctagagtattcatggcagatatgcccaaaggcatgtttgcatagcaatttctttttttctttcttttttattagatattttctttatttacattgcaaatgttatcccctttcctagtttcccctctgaaaatcctctatccgctccccctccaccccctgctcgccaacccacccactcccacttcttggtcctggcattcccctatactagggcatagaatcttcacaggaccaagggcctctcctcccattgatgacctactaggccatcatctgctacatatacagctagagctatgagtcccaccatgtgttttctttggttggtggtttagtcccagggaggtctgagatactggttagttcatattgatgttcctcctatggggctgcaaaccccttcagctccttgggtcctttctctagctccttcattagggaccctgtgctccatccagtggatggctgtgagcatccacttctgtatttgtcaggcactggcagagcctctcaggagacagctatatcaggctcctgtcagcaagcactcgtaggcatccacaatggagtactacgcagctattaaaaacaatgaatttatgaaattcttagacaaatggatgcatagcaattccaaatgaaatcaagcaaacaacaaaaatcactgggcttgggcgatgggtcagtggttaaaagtggttaaaagtggttaaaagtggggttgcattcccagcatcacatggttctctaggtccaggggcgttcgcagcctcttttggactccttgggtaccaagcatgcacatggtgcacaagcatacatgaaggtaaaacactcacacacaaaataataacataattctaaaagtttctaaaagattgatcattatgggtgttagaggaacttcctcgctaggtaagatttggcgctacatttcccacaaagggtgcaaatcaagacagtttacagtggcactggatagtgcataagcttatgaagcagtactctttaatcttataggtgactgctggatacagccgaaaagccattttaggatgtgtggctgtgtttaggacgatcaccagctctccctcaacaggcccctttccactgcttccatgtagccaaaccatggctctctgacaccgagaatttagccacaaagaaacaaatctggctgtgggggtggctgttactgtaaatagtaggaacttccctggccccttgcctattacagctgaagcctatttactttcaagtagctgtctaaacactaactatacgctccagagggaggcagacccacagtcccaagcactcaggaggctgaggcaagttgggctcttcagccaaagagttgaaggccagcctgcgcagtataggaagaccctgtctcaaaaaaaaacaaaacaaaattaatcataaaattcaagaagcaggggctggagagatggctctgaggttaggagcactggctactctggcagaggacccaattttggttcctagaacccacatgtcaacctccaactcctgctgcaggagatccaacacctcctatggccttcacatggcacacagacatgcatacaagcaaaacactcatgcacataaaatc

SEQ ID NO: 319 - DNA, 1308 bp, Mus musculus
cttcaaaatgtctactgtccacgaaatcctgtgcaagctcagcctggagggtgatcattctacacccccaagtgcctacgggtcagtcaaaccctacaccaacttcgatgctgagagggatgctctgaacattgagacagcagtcaagaccaaaggagtggatgaggtcaccattgtcaacatcctgacaaaccgcagcaatgtgcagaggcaggacattgccttcgcctatcagagaaggaccaaaaaggagctcccgtcagcgctgaagtcagccttatctggccacctggagacggtgattttgggcctattgaagacacctgcccagtatgatgcttcggaactaaaagcttccatgaagggcctggggactgacgaggactccctcattgagatcatctgctcacgaaccaaccaggagctgcaagagatcaacagagtgtacaaggaaatgtacaagactgatctggagaaggacatcatctctgacacatctggagacttccgaaagctgatggtcgcccttgcaaagggcagacgagcagaggatggctcagttattgactacgagctgattgaccaggatgcccgggagctctatgatgccggggtgaagaggaaaggaaccgacgtccccaagtggatcagcatcatgactgagcgcagtgtgtgccacctccagaaagtgttcgaaaggtacaagagctacagcccttatgacatgctggagagcatcaagaaagaggtcaaaggggacctggagaacgccttcctgaacctggtccagtgcatccagaacaagcccctgtacttcgctgaccggctgtacgactccatgaagggcaaggggactcgagacaaggtcctgattagaatcatggtctctcgcagtgaagtggacatgctgaaaatcagatctgaattcaagaggaaatatggcaagtccctgtactactacatccagcaagacaccaagggtgactaccagaaggcactgctgtacctgtgtggtggggatgactgaagggctcagcacagtggatcacccagaagtggctctacctgtgccccaacctggcgttctagagacttcgctctccactaatggacccctgagctcctccctgtgaggatgatgacagggctgccgaccctttccccatcttagctgcccttgcctggctttctcctcattctctcctttatgccaaagaagtgaacattccagggagtggggcgtagcgtctgtgacatgagacacttcctcttatgtactgtgtcgtgaataaaccgtttttactttag

SEQ ID NO: 320 - protein, 339 aa, Mus musculus
FKMSTVHEILCKLSLEGDHSTPPSAYGSVKPYTNFDAERDALNIETAVKTKGVDEVTIVNILTNRSNVQRQDIAFAYQRRTKKELPSALKSALSGHLETVILGLLKTPAQYDASELKASMKGLGTDEDSLIEIICSRTNQELQEINRVYKEMYKTDLEKDIISDTSGDFRKLMVAKGRRAEDGSVIDYELIDQDARELYDAGVKRKGTDVPKWISIMTERSVCHLQKVFERYKSYSPYDMLESIKKEVKGDLENAFLNLVQCIQNKPLYFADRLYDSMKGKGTRDKVLIRIMVSRSEVDMLKIRSEFKRKYGKSLYYYIQQDTKGDYQKALLYLCGGDD

SEQ ID NO: 321 - DNA, 120502 bp, Homo sapiens
  misc_feature (1)...(120502): n = A,T,C or G
aagtatgactacaatagataggataaattgagggggcaggttggaaactacggaagtctgaggacatggagctcaggagaccttatttttcaatctaaacctaaggctggccaggtgcaatggctcgcacctgtaatcccagcactttgggacgccgagacaggagaattgcttgaccctaggaattcgagaacagcctagacaacatgaaaatacctcgtctctgcaaaaaattttaaaaagttatccgggtatggtggcatgtgcctgtcatcctggctactcaggaggctgacgtgggaggatcacttgagcccaggatgtcgagtctgaggtgagccatgactgcaccactgcactccagtctgggtaacagcatgagaccctgtctccaaaaaacaaaaacaaaaacacccctaagtttacagtgatcagtcctacttggcaagctgttcactcttgtttctgtgtactaaatatgcctgccatatggtgagaatgcagccaagccaaggagatggaaggtgcagattttaaatctactggagtggaacaaataagtaataagggggtaagaactacagaccctcacacacagtggggcaggtgcctctccttcttctaggctccaaagctaaatgggataggggttcctttcaaaatttttctttggagaattacatttgaattatatcatttggaagtgaactttgaatgtggaaaaaagtgtggtaaccttccaagaaagtcacttaaaaaaataatggctaacccttttttaatttgtttttgagatggaatctcgctctgtcacccaggctggagcgcactggcgtgatctcggctcactgcaagcaccgcctcccaggttcacgccattctcctgcctcagcctccctagtagctgggactacaggcacccgccaccatgaccagctaatttctttgtattttttttggtagagacagggtttcactgtgttagccaggatggtctcgatctcctgaccttgtgatccacccgcctagccctcccaaagtgctgggattacaggcatgaaccaccacgcctggccggataactctttaaatgctactttttgtctagctggtctttctcctaacctttttaaagtcgaaccaggtacagtggctctggccaggagtggctcatgcctataaccccaacatgttgggagactgaggcaggaggatcacttgagcaaaagttcaagaccagcctgagcaacagggagaccctggctttacaaaaacaaatttttaattattcatgaaggatcatttgagcccagaagttcgagaccagtttaggcaacatagtgagaccccccatctctaataaaaattaaaattaaaaaaaaaaagatgttgggctggggttggtggctcacgcctgtaatcccagcactttgggaggccaaggtgggcagatcacttaaggccaggagctcgagaccagcctgtagagatggtgaaaccccatctctacaaaaaatacaaaaaattagctgggcatggtggcacgtgcctgtaatcccagctactcaggaggctgaggcaggagaattgcttgaacccgggagacagaggttgcagtgagctgagatggcgccactgcactccagcctgggcaacagagtgtgactctgtctcaaaaaaaaaaaaaaaaaaaaaaaaaaaggccaggctcggtggcttacacctgtaatcccagcactttgggaggctgagttgggcagatcacctgaggttgggagttcgagaccagcttgaccaacatggagaaaccccatctctactaaaaatacaaaattagctgggcgtggtggtgggctacttaggaggctgaggcaggagaatcgcttgaatgaatccaggaagctgaggttgtggtgagctgagatcatgccattgtactccagcctgggcaacaagagcgaaactctgtcttaaaaaaaaaaaaaaaaaaaaagatgctgcagccttgaaagagaaaattgggcttaaacgttaaaacaaacccagcgcagtggctcacgcctgttatcccaacaccttgggaggccaaggcgggtggatcacttaaggttaggagtttgagaccagccatagccaacatggtgaaacctcatctctactcaaaatacaaaaattagccagccatggtggcgggcacttgtaatcccagcaacttggaaggctgaggcaggagaattgtttgaacccgggaggcagaggttacagtgagctgagatcacgccactgcactccaacctgggcaacggagtgagactccatctcaaaaaacacgaaaaacaccaaaaaaaaaaaaaaaacagttaaaacaaaatggtaatatggagacctgtactgtcagcccatgtgggtcccaggccattctcccctacctctctgccattcctttttaattagatattaagggtataagggcttcatgttttttttaacaaaacagggcagataattttataatatacataatttattagtagactaacagaagcaatgttgactattccaagatatgatttctgtttatgaaggaagagtagctgcagccctaggagaggggtcaacatctttgaggactggcttgggtgagtggcagatgcagatgtctcaggtccaaccctgcatccactaactctgtaccttcctttttttttttttttttttttttgagacggcgtcttgctctgttgcccaggctggagtgcaatggcgtgatctcagctcactgcaacctccgcctcccgggttcaagctattctcctgcctcagcccccctagtagctgggactacagcgcccgccaccactcccagctaatttttatacttttaatagagatggggtttcaccatgttggtcaggatggtctcgatctcttgaccttgtgatccacccgcctcggcctcccaaagtgctgggattacaggcgtgagccaccgcgcccggcctgtctgtaccttcttaactcttttgttgtctgggttcatgtttcagcttgttccagttatccagaatgcccacaagaataccacaggttttggaagagaaaggggatggcagatgttagcctgttcctgtggagacttacatagggctgatgtcattcattggaaaccacatcacacttagctattcccttgcttgtgggaatactggatttttaaactcttttttgctgtataagtacattattcatgttatcattgaatattccatttcagttcactacatttttgaacatttttaccctcaccaaattattacttttaaataatatcacatgattttgaatattgagtatttcaggaagtccaaaatcttgattggactgatagatatccacttcagccctcatatcagaatgattaaatattttttacaaccagaaaataaatcttgctgagttcactgaacagtgttatcaaatgagggcctgatcaaatcagtatcctcttctgctactatgttttcccctcttaatcaccagccctggtccagaatgactgctagctcttcctcaaaactcctctcaagtgaccagaatttgccttcagctttgagggaaatacttaagcagagggtttccaaaactatcttcacaatggtggcattaatcaaatacctaccttctctaatgactaattctcttcacctgtttttatactggatggtttgtttaaaaataaacagtcacacctctctacattgccacttcctgctgatagagaatacattggtttatgttacatttcctctttcatggttgtgcaatggcttcaactaactatgagcaactttaatgcattggccaagatggaatggcttacttcctttctctaatggtgaactgttccttgacagaattagtcattctcttattgtattctcctggcacttagatttcatatctgatgcatttgtcaaattatcattacatattaacttccactagtccttaaggtggagtttgatgtttcttcctattatatgtgctgtgtagccctgcctggcttggcatttagtggatactcaatgtttgttaaattgaatgactcttgggggttccttgattattataatcaggtagatactggcagctttttcagatggtcaaaaccaattagatttctttttatctttttttttttttcttcttagagacaggatcttactctgtcatccatgggggagtgcagtggtgggaatcatagttcaccgcagcctcaaactcataggctcaagctatcctcctgcttcagcctcctgagtagctgggactacagatgtgcactgccatacccaactaattttttttttttttgtaacaatgggatcttgcctttttgcccaggctgggctcaaactcctggcctcaagcaattctcccaccttggccttccaaagtgttgggattgcaggcgtgagccaccacgtccagcctgaaacaaggtttttatctctacgatgcgttcttttttcttttttactgatttcatagaaaaatatttataaaacaattgataaacagccaagtccatgtaattgataattaccagaatagggagtcctctttaaaaatatgtcttagttaggagtattataagtttgtttcttcattattttacaattctaacagtttttccttagattccttccttttaagctgcaatataacctgaatactggaagggttcttcttccccctccctagttgctttagctgatgaatcatagaaatcagagaaggggaagaccagtgaagtcatctgattcatctccaaatcagggagtggagcattggaatttggggaagaccaacctctcattttaagagaaaagaggtttttttggtttttttgtttgtttgtttttccagcttgagctgattagagcagcttacccatctgtttgccttttgcttctaacacaattctgagaccccaccctattagaaagcaatcaggccttcttaccaaaaaccccaggaaaaccagatgccaaaatgttaagtagttgaactaaaattctactacctgagtaataaagttggtttatgaatctctcagtgattgttttaactgagtcttacagaatttgagactgttttagcagggtcttacaaatgtaagagctagcaaggaatttacagatgatctgggccaaaatattctgttctccagatgctaagaaactaaaatttatttatgtatgtatttttatattaactggctcagaaagtaaaaactaaaatttagatgtgaaaaaatgtcattatgctgtagtcaggagtataaacctctcccttcactgctctctgtatcacaatgtcacggtatcctccctcacaatgttctcttccactgtcttcttcctttcctcctccttctccttcctattcttctcttttttgcattgtttgaagaaatggcagagatgatttagtatgcatgccagcgattcattccaacctcacccaatctcccagcatcatggtcacagaggcaatggatgccaccccagccccagctgcagcctgtcccctccctccttgcttccctcctacttgcatttgtgttcttccagccatagaacttggcttccccctctgtttaaattctgctcttgtatttcagactttttaacagatcagagtgcccttggcttctcccttggtatctagcttagctgtactccaacttctcatgttctcccaaagcaaccatataccagctctggcctcttgggttacaaaactgggttccattctgcttgctgcttgccaacactccctgaagagtggggaggaatatttgcactctattgctagtgatagctttaagtgtgtccttagtgtatatacccatatttagtcacctaagtatgttatcacaggttcactttattagaaacctaagttcctttgcaacatatggacatttaacagttgcctgttataattatcttaatgatattcgacacagctttattttactttaaagtgatatttctcaattgcagctatatgtttaaataatctaggagctaaatacatgctggggccccacaatccaaagagtctgaatgaaagcaacaactttatatgcatgtattcaattacacagggatacccctcctaatttgaacaaaaaaggaattcagagaaagaaggccaatcatatttggtaaaaatgatctattgatctacttgtaaaaaggtttaattttattattcaaagtacttccatttagaaatcctattgggccttttcagtgaacagataaatcttgtctgtgtttggcaatatagatgtgcatgtatatgattaatgtgcttaaattattacatttgcatattaaggatcaagtttttgagctaaaacagaatttgataattttttagtcaaagacccttattttccaggtgaggaacaggaccagagagcttaagtgacatgtacaagtacacccagtttatataggagctaggaccggagcccaagcctcctgagttctatgatgaatatcagagtatccagtaatagagtccactccaacaacgtcaggtctctcaacatggagagcatgttatgagccccacgctggggttacaaagatgaacaaggagctcctagtttgatggtgcaacctgaaacataaacagtcatagtaccaagagataaaagatgtaatacaaacaatacaaagcttatatgaacaaagaaatgtgctctacccttcccataaacttcatgccacaagttatcttatttattatattaatttgcttagcaagctttttttcttcatgcattgtatgaaatatataagcattggctctgcctaagttgtattctcatagattataactagaagaaacaaaatcacatgagatgttacaatattgagtgttttctttgtcagcagagagtgctatgatgtccatcttttcctctatttatagatttttaaattattgttttcttaaatatacatgaaaaataccatcaaaaagattcaagttttccccaaagcctggcatgacctgtcataatcttaagtgtaagaagacagcccttcttttcgctggctatatgtcttttttttttcaactctttttaaaactatagaaggtgtctctattaactgttaacaaaaatcaaacaatgcaaacaagcatatgtagtaaaggtgaacactctcctgaacaaatacttttcccaaagctgaccaatatcactttggtgtacatacttccatatatttacatatgtgcttacatgaacctacttatgcagacatatatgaatatacacataaatgtgtgaatacacataaatattaacataaatagaatcaatttagtcatattattctgtttgacttttttttttttggctgtaagtttattcaatgcaaaataatcctctccaattttactgagatggctgaccatgtccacgaccaaatctgcctctaaactggaattcggttgctgacccactcccagcatcggctttcttgtcagcaccagggagcacagcattccatctgtaggtatccctgttggcttcccctcttgtgagtcttgcaggtcactcaccctccagacctttaggccgaggcctgccagtctctggacggctgtggcatagggtggcaggcacaatctccgggggcagatgaaggtaatcacggagatggtggataccctcattggtaaggtaccagtagaaatgtctccaggcaaactgttccttcatgtagcctcgggacttgagagactgcatggccttcatgacatgaaggttgggcacattcttgtctgccaactctggctgcttaggcgtgtagacatccttcttggccaccatggctccctccttaaaaaggagttcataaatggcaatccggttcttcttaggcatcaacatttcggcggctgtagcgtctggggccggggctggaaaaaaaggagacttttttttttttttgagacggagtttttcgctcttgttgcccaggctggagtgcagtggcgcaatctcggctcaccgcaacctccgcctcccgggttcaagcgattctcctgcctcagtctcccaagcagttaggacagtatttttcatgaaataaaatattttgagtgaatatgaaaacacacaaaaacatagctgcattttgaatgcttttatctttattaagggtctactgaatgtattttgggtgttttgaattttttaactttgaagactaattccattttttaactttgaagactaattcaaagttaaaaaaaattcaaaacacccacaaatactttcaatagacacttaatgaagttaaaaacattcaaaatgcagcgtatgtttttgtgtgttttcatgttcactcaaaatattttatttcatgaaaaatactgtcctattttgaataggctctatggctaagaaatacgtattgtattgcagaattagggttttttttctattgataacagannnnnnnnnnnnnnnnnnnntgacctcgtgatcctcccgcctcggcctcccacagtgctggaattacaggcgtgagccaccgcgcccggccaatatccaggtttgaccgatgaaaataccaggacttgaagagggaagagatagggccttagcaaatggcagagttgagactatgtttcagtgctctttcccctttcctcccctaactgcttcttccaacaaaatccaaccctgagctggctacttctaagactcaacctctcatacttttcttcctctgaaagttgcagctgacagtcttaacattccgaagacttcctcaccgctggatgtgaattaactctagcaatactgtcctattttgaataggctctatggctaagaaatacgtattgtattgcagaattagggttttttttctattgataacagacacttagcagctaaatatttgtattttctacaaaattagatggaaaaatgctgttggaagaaacaatagaggctgatagggtttgaaatattcattctctgacatgccaatgtataaatgcagtaaaatgtgctgagttaagaataagatgcttacacctcaggaagcatcccaatattccagtgggttaatataggaatgatcttgacagagtgggcatctgtagccaaatcagttttcataatgttttatacatcatatcgtaacttagcaatccagcaagacacagttttgcacttacattctgcttgttctttcatttagcactatattttggaaatctgtccatgtcagaacatgttgatctactccattcctttcagcagcttcattccactgaacacatactctaaaattaatttaatttagcctcattgatggccacctagggtgtttcaatcttaaaatgctgatataaatgtccttatacatatattgttatggtcacgtagagctctctcttcaagatagctttcttgaagcaacatcactgcatcaaagggcatgagtattttaagtattgatagatactgacaaattgccctcccaccgataatgtctgagaattcccattttgcccattttcaccacactgaatactatacattttaatttttgccaggtgagtttaagtatgaacaaaggcaaggtaatgcgtttatggagaaaaatctgatagtaacaggtactgggtaagataatgtcaatgcaaagaggaaacatccaaatgcctgtccccaagaagctcctgcctagttgctgagaccaacaaattaaaaaataacaatgcgaggtgacaattgcaagaggagaggtatatttttaaaatgccaagagaagtagtcaaatctgcctgaagggcttgggaaagcctttgctctgcagtagaaaataatatttactctgaggcttgatggatgaggcaaagttcaccactgaggaaagcaggaaagggcattccagcaggaaaacaggatggaggaaggtacaaagcatgaatgagcctggcctgtccagcagtggcacatggagcggtgaagagtgaagatgtgggggaatgaggctgcccaggtaggtcagagccctgctgggaagagtttctggagaggggtcatataatcagaattatgtctcagaaagagaattctggctgtctcagagaatgaactgaggtcaaaaatgtctgttacagctgagaaagagacattgaagtcactgcagatttttccctggaaatgcctccaaacaaaatagacattgtggtttgtccataccaagagtactctgtgtggtttgggtcatgacacgtgaattcaacaaggatttattgaggtcttactatgcgttcagcaaggccagctgctgcaaagactaaaaaagccaatgaaataactatggctttttttcatcacctacaatataccagacattctttatacattttttaatctttttttttttttttgagacggagtctcactctgttgccaggctggaatgcagtggcataatcctggctcactgcaacctccgcctcccaggttcaagcgattctcctccctcagccttctgagtagctgagattacaggcacgcgctaccaagcccagctaatttttgtatttttagtagagacagggtttcaccatgttggccaggatggtctgaatctcttgaccttgtgatccacccgccttggccttccgaagtgctgggattacaggtgtgagccaccacgcccggcaaaaacttctttttaaagactccaagaaagatttaatgtggtacttcgaagacgatctcagggcttctaagaatcttaagtgcattgtcccactgcagcctgacatgtaaagtagagagagatctatttaaaaaaaaaaaaatgaatgtgaatcttggaacatggaattaaacctcagcaagatttatataaataaagtttttgagaaaattgtatataaatcttggagcatggtgtgaaccttaataagatatggaaaatctacatggtttttaagatacttgtattaatgaaacaactgccagcttaaaccagaaaaagtgcaaaatgaaaagaagtttctagacctttcagtttctcctggcatgaatgaagcagactgagagaactgctcagctacaaatatgggccattctttttttttttttttttcttgagacggagtctcgctctgtcacccatgctggagtgcagtggtgcgatctcagctcactgcaacctccccctcctgggttcaagccattctcctgctgctcagcctcccgagtagctgggactacaggcgcccgccaccacgcccagcttaattttttgtatttttagtagaaatgaggtttcaccatgttggtcaggctggtcttgatctcctgacctcatgacccgccctcctcagcctcccaaagtgctgggattacaggcgtgagccaccatgcctggcctgggccattcttaagaaaaggaaatacatcttaaagggaggagcctagatatcagagggcaaaaccaaaaacttgagtagggcaatggattaaaacaaggatcagcaaactacagcccatagggcaaatccagcctattgcttgtttttgcacagcctgtgagccaagaggcctggcagcttcagcttttgcttctagaaggctggctgccatgactaccgtggtgtagcaaaagaggagaacctggaggatgtaagaccaaggaagagaaaggcccagcctgctctttgtcattctagcaatcccagctcaggcgccagacaaatgaatgaagctgctttcaatcttccaaccccaactaagctacccaacccaacatgctgtggaggagcaccaagctgtccccactgggtgtcctgcttaaattgcagaattacaagcaagtaaatggttatgtttaaccactaagtttatggggataatttgttatactgcaaaggtaactgatacgagggccttgggtgcattatttaatccctggactgggcaggagattttatttggactccaatttcttcatatgtaaaaatcaagagccgggtatagtaattcacgcctgtaatcctagaactttgggaggctaaggtaggcagatcacttgagcccagaagttcgggaccagcctgagcagcatagcaagactttgtcgtctctacaaataatagaaaaattagccaggcttggtggcgtgggcctgtggtcccagctactcaagaggctgagaggagagggtttcttgagcctccgcagtcaaggctgcggtgagccctaatcatgccatgcgttccagcctgggtgacagtgtgagatctcaactaaaagatataagaataataatagtaaaaatcaaggatagggcaatttaatctctagggcccctccctgctttaacattctattattcagtgaataattgtattttatcattctatcacatttagtgagtgcctatcattgctagctaggcgctagtaggtgttgagtgcagcagatgaagtgtgaacaaaacaaagtcaagcacttagagaacaatatggacaacagcagacaatctgagggctgatgtaaacattctcctcaaccaggggggaaaatagagtcttctgactaataaaagatcttttatactggaagaactggcctcacattcctcagaaatagcaaactatgacttctaatagcttcatttttatgataacatcagtgcacatttctttagcatgatgcaaagactggtgattgtacaaatctatagaagttagaatttgtggcatgcccaagatgagcacaaaactcttttggacatttgatggcttttatatattccacatgatttgaattaaattttatcttctgtaaagggcctatcacagcacgattaggagtaagagactgtggaacctatcttgagatacacagaagggaggctgaatcgtgcccaatattactgtctgcctgtgttcccctaaccttccaaaatgttcacacaaagtaagcagataaacattgtttctgactttgaagctttcaggctaaattgaagagctataaatgtaaatcagcaattgtacccaaagtgttgcttgattttctatttggctctgtggtagggcccatcgcgtataattcctcgtgaaagcgctgggtaacagaaagctttgggcgggttaaaagacctcagctgtggccgactttgcctgtgtcactctatgcgagtgggcagagcactgaatgtctgttggccttgctatcattctctgattcccaggagtgaattgacgctcaaatggaaagtaaaaatggatgttaaggtaaatgggagattgaaacacagaatcatcaaaaccaggaaaaagagctgcaggaagtagtgtgcaaggaggggtttaaaaaacgcagccagagatcctcgggattctcagcgtcgctttcctgttagtttgaggttcgaatacagtatttgcgtcgtctcacatacaacaaataggtgtctgcctgcacgttgccaacgtgactcttggaagaaaagcgagaagcagcaaaaccgagcaagggagttggctaaacggctgcaagaaacacacacacacacacacacacacacacacggaagaaaagcgagaaacagcaaaaccgagcaagagagttggctaaacggctgcaagaaacacacacacacacacacacacacttggaagaaaagtgagaaacagcaaaaccgagcaagggagttggctaactggctgcaagaaactctctatctcactctctctctctctctctctctctctctctgctgcaagaaactctctctctctctctctctctctctctctcggaagaaaagcgagtaacagcaacaccgagcaagggagttggctaaacggctgcaagaaacacacacacacacacacacacacacacacacaccacacacgcacacacacaccccagcagtcatgaaagaaggagaggaaagttctttgttgaaactccgggttcgaaacacacacacacacacacacacacacacacacacacacacacacacgaaactccgggttcaaagctatgggccccaccccgctcaggactgcctgccacgaggccgcgcagagatgccccaggcgcggagagaagcggagcacagccgtgctagggacaggggcgccaccctgggcgggactgaggtgggatcctggctcccggctttggcctcccagcccaggctcggggcttcctggcgctcggaggccggggcgggccaggctttgcagcacagggcgaatctccctccctccccgggcgccccccgggaactggcggccagaggttaagctgacatgtttgcagacggtaatggggcgctggatgccaacagccccagctcaggggagtccagatttatgtttcttggaacaattctttcctccattgcattaacgccaaaaaaaaaaaaaaaaaaaaaaagccacttaatcaagcccagagtctactactaaagtcttgttaatttattaacccaagccgaggctgagagctcgacgtggcacttaagaagtaaaatgaggaaaggaggaagaaacggggtccctgtgggcctcggggcagcctcggccgggctttctcggagggcagggccaggggcgctggggccgctcccgcgtggcgcggctcgggagcgttccagggcgcggtccctgcgggccggcgggccggggtgagtcacccctgacttggggtgggagcgggccgtgtaagggggaggcggggcggggcggggcgggcctcgcctcgcctagggaggatgtggcgggtataaaagccccacccaggccagccggctctgctcagcatttggggacgctctcagctctcggcgcacggcccaggtaagcggggcgcgccctgcccgcccgcgatgggccgccagctagcggggtgcggagacgctgggaagaagggtacggcctggcagggaggccccggcaactggccccggaggccgtcgggggcagggggctgaagggacggccggcactggagagtctttggggagggggctcagggacaaggtgtttggggcaggggtgaggggccaccggctcgtgggcacgaaggtgcagggcagaggtggtggggggtcgggcttctctaagaagcctagcgggacgcggcatggcggcgtggggagaggggcggagggaggcccgcattccagacgcgccaggcgcgccgaggcagggcgtggccgcccagaggagccgcaggtccccggcgcagcagtagcaagtgggctttccactgccctctagaaagtgccccccatctgctctaagttactgtactcgaaacaaacgcgcgcttgtggagttgaaccgaccagcaggagggaagtagcgggggaagacgagaggggggagtgtgagtaggcacccctcagccccccataaaagaagacattaaaacgtcagttattccccttgctctaggttatcttgtagcatagcaacttcggatttcactctacccggagagtttcccgcttggttgaacacattggcctcaggaaggtagtgtcccccatgattctgtggggagggttgtcctgttactcgccatgatgtgacaatgagtcaggaactgagagtagagagaagggcgtggccccggggcctctcccttctggccgctctgtgcagctggccccactgctggtgtggagggcttgggttccatcagccggctgttgagaagaaggaggggaacacagataagtttccttatctggcaaggtggcttaaggatgcctattcttaccaccacccagagttattggagatttcaaaatacacagtcattaggtaataaatgtgtaaagtacacaaaaaacaaagtgctgtgcaaatgcaaagtgtcatttttgtagtaagattgccgttttaaagctgtgggtgttctgagtgcgtgtgtaaaagagcagtggcctcatgggtgcacgctgggccattaccaagaaccttaagttgttggtgtgcaaaggcctgggccccagactgtactgatggattctgttcacacgtgtgtgctactgtgcctgtctggaacttggtgacttggaatgcagaatgcactttcccactgaaacagtgttgcagaaggtgctgacgttcccaggctagccctgaaagacctttttaacatgcactgcctgattatgggattggtggtggggaggtggagggtagtgaggggcaatgtgtgtgtaggaagactaaatcactgaaatatttttctggaactttttttagctttaaggttgacactgagtaaattattttaattggaaaattatgtctttgcccctgttccactttcttttttccaccttccacctccttagagacgctcttctggctcttccgtgacgcattacaacagccatccaggccggtccagttacgctgcattccttcctccttcccatttcggcggacctgcatccagctagagactagcagattgaatcgatattcattaagttaggaatggttggtggtcctaagagcctcagcaaccgagaggagtcttgttatttaaaaaacaacgatactgggcgtggtcgtgggcctgtagtcccagctgctcaagctagtggatctcttgagtccaaggccaatgtgagcaacatagcaagacccagtctcaaaaaataaatacataataataataaaaaaccctcgttcacctaaacagatctataatttatagaatgtaaagcagcaatattcaggcaatattaaggaagatttttggtaagactggggcagcagaggtgcccttgatgggcaagggccaggagtgttaacacagtcctgcttagtaatttcttcccttcttccaagtctgtcgattatctaaaggtcaagggtttgtccaaaaatgtcccttgcatctgcagtggaaggatgtgacatctatgtgcatttttacaattggaggtttgtgatttggagaccgtttagattttgtaatttcccgcagtgccaactagactgcctgtggtaaatgcccaggaaatattgctgactcactgactttgattaggagctcagtcttgcactggagtctcaatatttagcatcttgtgtctttgagctattaaactatggtattgattgacatcaggctcgcagtcatggccgttagtttcctggctaatttctgatttaagtagttttcctggcaaagtagatgtgcttctataattgctattgattttgagggctgtaggctcttcctacaccactgggcctagaatctggcactaatgcattgtctggagcctttgttctcacccttcgcttgtgcagagcctggagcctgcggagacatttttcattaaaggagagcgggattgtcacaaaaggagtctcaggctctagtgggctgctttaaacaaccatttattccacaaaatattaattacctactgtgttccactcatagttatgagcactagggatacagcagtgaacaaaacagacccccgccaaaaataaaatccctgctctttagaccttaaatctggcggagagagaaggaaaagagacaaaataagtgaattgttggattttaaactttatattttcccaaattaatactagtttctaaacttggtgggagttcatttcccctttaatccagctgttccacagacctaaacttcacattttacctacctcggggaagttttgcttaaaattatggtgtcttaagctgccttccagattcaattgggagaattaaatagaaatggaatgttcctcttttttttcacatgagaatcctcttcacttgccctggtgccacaccctattctagttgtaggccacaccagaggaaattccagtccttcaaaaaaattctttccacccattcactgcctggtatcttttttcttctgctgttgccagaggcagtcctcatctactttctccagggacaggtcagcagtaggggtcaggagatgcccatatttgtccttctgggtggttctaccagatgacttccaaatctcccttctagggtacaccctgaagctgtttttcttttttttttcttttgagatggagcctggctctgtcacccagcctggagtgtagtcgcacgatctctcctcactgtagcctccgcctcccaggttcaagtgattctccagcctcaccctcccgagtagctgggattacaggtgcctaccaccatgccgggctaatctttgtatttttagtagagacagggtttcatcatgttggccaggctggtctggaactgttgagctcaagtgatccgcctgtctcggcttcccaaactgctgggattacaggcgtgagccactatgcctggcccaccctgaagcttttaatccagctgagctcaactggacaggtcggtagcacccaagtggcctgagttttaccccaggtgtggtgtagaaatttcttattctagggagtgactgtgttatggagccctttgtccatgtcctttgtctccctgccacacccaggctatacactcacagctcagaggaaatcagagtcctaaggccactcgtacatcctgcctctttgctgccttcttgctaggagttgtaggttacgttcccatgtggtcctatggacagagctagggtccaagtatccctgacagcacagaggtggggggcatggctatatgttgataagaggctgccctgaagcgacctgctgggctttgctaagatttgcagaagttggtgatttaagcctccaactctgaatgcacggaactggaactgcattcgaaatgtccagtctgagggagagagaaaattgaggaaggagagtgtgttggaaaagaagaaaaaaagactttctaatatagaaagacccagtgtgtgtaaaccatcccaagatgaaattgaatgcctatcgtgtgccaggcactgtgctcagacttatgaggaaacaggagggagttaagttggaaaccctgtgggcggataatacggaagacagactttacacatgtaactctaatgttgcacagacacacaaaaagctgcagaagcacagggcaaggaggggtgtgtgagaaaggcggcatttatgatttcctgtatcctaaagactcattcagatgtcagctaattaagattgaggttcctggtggagggaacttagaaagtgctgagcgtgtttggagaagagttaacagtccagttaactcttctgtgcaggatgcgtgtatgcatgtgtgtgtgtatagaagatatttaaggaaaggtaggtaagtccacagtgtggaaggtcttaaatactgacattagacttttttctgtaggcggccaggccctgttgaaaatacaatatgtgggccataaaacactgaaattgagttgcagacttgaaggcctggatttcccaaccctgaaagtgcttcatgccaagtgacatcattcttcctgccggtctctttccacccactccaaccccagatcaggataccagcagagagaggctgtgagagcatgaagctgcaacaagtcagtagggagcaaacaaatattgattcagatcaggccacagaagagacaagctggagcaagtgctgtgtgtccctcctgctcagtttgatcgaggtcactgggccgaattccaggaattctggggaatgagttggccctgtgactcagtcattaatcaagaccataaaaccaaggagaagaatatctgctttcaaaaaggttctgataaataaagatgcagtaggtgggtggaggatggagtacagtgggaacccctctcctcacccagtacattttttttttttttttttttagtttaaaattccagtgtggcctgtagactgtgtgtccaggactgtgtacagtaagagctttgatggagaacccaactctccacactcccacctctacccatttttgctttaaaatcttcatttgaatcaccagtccctgattgattcaccatggttgctaagaatctgttttgcggtaacgcatcaacactccacgtttaaactgtgaagtgggtgtgtccacaaaacttctggattagactcagatttgcctgtgcagaccagccctgttgcagtatgtttttgtttgttcagattaacatttgggctttttggaactggttcttaatttagttcagtagaatgtgtttttactatttgaagtgttgacttttaagttttcttttgtttgtttgttttaacctttttgtaaacttttctttttgggagtaaagttaaaactgcttcacttgtcctttttttgtttgtaactgcactttcgtagtgaagcaatagaatacaataaaatctatagagttttttttttttaataaggacaaacccttaaattattaggttggtacaaaagttaattgtggtttttgccattaaaagtaatggcagttatttttgcaccaacctaaataatatagtccttatgttaaatgtaaatgacttgtttctcaataactgcactgatttcattaatgatcagccttgtactgtgagcttttttagccaggcattcacagtctcatttatcagccttttcaaggcagaagaaactgttcttttcattagggtggggccaagtgacctgttttcctacccaagtagtgaatgattttaaaccagtttgaggtgggtatggctcttatcagtgagtctccctgtacctctagtttatttccttaaacagaaaaacgttctctgataaagggtcattttaatgatgttgtctagtgaccctgccctccctgggaatggaaggcacggcactgatgtgtatgtagatgtactcatcaacagattgaatttgctgattttttttttttttcttgttggagagttgaaaccagtcggcaagctgggtgaggttgaagtgttggaaagagtggtgcaaactgccattttcatgttctttagagaagtctgccagaaaaggagtagtggttctgtttttaatggatttatgagttttatacggtgatgaggagtgagtagaggtgaaattgtctcatacagcatgtaggctttattttttattttcattcaaaacagtaagtacactgaagtcagagtagttgttttcagtaagaaaattctgcctccagagcaaatgttttggtgaatagataaatatgagtactgagtcccaatcattttggctcataggttccccagtatttccataggcaagcttaactttgcaccattcagagacttatattttaggttccccacagggcaccccactggacgtggctcattttccagcctgtagtcttgttcttctgccaccctggggcattattcctcttcccctctccccaggccttcccccttgcttcttggctggaacctcccatggtgattcacccttctcagcctaggcagacagcacctccctgttaagcccttaactaatcccgctctgatggctgtgatctttctctctgtgtcttaatcacttggaataaagaaccattgtggtgaggttgaaagggcattggcccaggagtctggggatctgggttttggccctgcctcagctacttaattcactgggtgaccctggactagactctcagtgtgtcacagaggcacgaagggaagagagctcaaaggtcctgcagggtggaagtctgcatttcacagttttataagtgtcttttgtatcctttaatatagtgcaggctcagcgtatgcttggtatgggttcgttgattaattccttgcgtattaccagtgtttgtaacctacagtagcactgccaagacttccttttcctgctttcaaggatagcagcacactgacacattctcattagtcaaatatgctatattaaactaatgttttaacaaacagtgaatcgcaaagccaactgttccttccagcgaataatagatcatatgcaaaatgactttgcattgctaggggatttgatggagtgaagaagcaagcactgtattttatttctttttattttgttttgttttttggacataacctcaagattttattgtcctcataataaaacaaaagatgatgcttagaactggatcacttggccctttcttttgttatctcctcccagttgaaaatgtttgcatgtcttaacagccagcattttcttagatctgcagatggggtcagcacactcaagcctcagcacaacctcctttgtaattttacccgttttccagaaaattgccttagtctacccaccatagtcactctgcttcttgtcataacgccgctttccctgggcatacagggagtcctggtattgtgccgttttgtggggttggtgcttgccacacttcttacagaaagcccagtgggttttaggaatgttcaccatgttttccggaatgctatcggcatgggaggaaagtggccatattttatttctagggtgaaaatgtttgccattaaactcacatgaagtaggaaatatttatatggatacaaaaggcacctgcatgggataatgtcaaatttcatagatactgctttgtggtaagtgtgactttgtggttattgtgatgtttgtgttttgttttttttttctgcaaaatggttatacatagtataaatgttatgcaaaatagcaactcattgttttcaagttgatttagcacctgcattatgtaaagataatctgaaatctgtagggggactgggactatgtagggaagatgaggtcaaccatatactttctactgctttgaattgtacctatgcattcaccatttgaatacttggcacgtgtagggcacttaaaacattctgccgaatggatgaatgaagtggtatcaaaaagtgccctggcagtgaaaggcaagatagagttctgtagagtaggggtcgtggtgaccctgttggagcagatactgaagtagtggtgagtgcggagaggcaagtcacattttggccctagtcaactgtagctgaggagtaaacagagggaactgtttactgtttacaggattctgatgctcatctttgaaggctgggctctgctggaggactgattttgaatgatgtcaaatgattttgacaagattaaatggggagatttagttggtggtggcatgcaggactgatttgatgaaagagcagcacagttatgaatggtgaaaccgaaaggaagatttgtggggcttttaacagtctcctcaaggtgttgtggctgtgggagaagaattaacatgaatggagagtgtaaagaagcctatcagattgtctttgatctgcacagtactggggagtcccatgtgggacacgggtaggcagcagtctacaaagctcagagctggaaagacaacttgaaagaacaacacaatgaaaagttaccgtgcctctagttgagattttctaaacatcggaaccaatgtgaggtgtctgatttcataaacaagtggaatttaatctatactctctaagtggaaacaactctgtttgcaactctgacttgctagttccctggttttgcttttgttttacgtttggcattttttatttcttgcctgtttatggtagagactagaattctgcacagcagatgacaacagtttatcccctgctgcagacctggtccagttctgactgagtccaggggtgatagttaaggccagggcttgggtggtttgatgtccatcctaggagtttcacctctgcttcggtaattctcgggctgagggatactgatgagaccctctagaatgtttcttggtccatgttgaagttagagatttcttgctctgtcaagaagactgtcagcctgggcaacataacgcgacattatctctactgaaaaaaaaaagccaggtgtagtggcacacgcctgtagtcccagctacttgggaggctgaggcaggaggatctcttgagtcctggagatcaaggctgcagtgagctatgattgcaccactgcactccagcctgcgtaacagagagagaaaccctgtctcagacaaaaaaaaaaaaaaaaaaggtctaggtgtggtggctaacccctgtaatctcagtgctttggtaggctaaggcggagggattgcttgagcccaggaattcaagaccagcctgggcaacacagtgggaccttgtctctactgaaacattaaaaaaaaaaggaaaaaaaatggaaaaaggaaaaaggaaattaaatggaaataagatatattcaacatatcatagttgtaattgtaatatatgatcaatatataaattattgggctggacacagtggtttatgcccgtaatctcagtgcttggatcacttgaggctaggagttcgagaccagcctgggcaacatagcaagaccctgcctttaccaagaaagaaattataaatgagagattttatatatttttttcatactatgtcttcaaaattcagaatgtcctttacacttatagcacatctcagtttgaactgaccacatttcagatgctttgtagccacatgaggctggtggctactgtattggatggttctgctacagagcaagactattctaaattgtctttttttttttttgagacggagttttgctcttgttgcccaggctggagtgcagtggtgtgatcttggctcactgctacctctgccttctggtttcaagctattctcctgtctcagcctcccgagtagttgggattacaggcgcccgcccccacgcccagctaatttttgtatttttagtagagatggggtttcaccatgttggccaggctggtctctatctcctgacctcgtgatctgcctgcctcggcctcccacagtgctgggattacaggtgtgagccaccgcacccggccgattgtcttcatttttaggaaagttttaggttcatggcaaagttgaatagaaaatacaaagaatgcccatgttcccctgttcccacatacgcatagcttccactgtcaacatcccgtatcagggtggtacatttgttagaactgatgaacctacattgacacatcgttaccactcaaagtccatcgtttacattagcattcactgttggtgttgtacatagatgcatccaccattacaatatcagatagaatcatttcattgccttaataatcccctcccctgaatccctgatctttttgctgtccccataattttgccttttccagaatggtatgaagttggaactatacactgtattaccttttcagttggcttctttcactcagcaatgtgcaatttaggttcctctgtgtcttttcatggcttgatggctcatttcttttcagtgctgaataatattccatgtctgaatgtaccacagtttatttctagagcaatactttttacaaaccagaattataccccaacggtgggacaaattggggtggggaggctgtctgagagttgtgagtgtgggggaagtggaaggtctttgactgacttttcgctgtgcataaaaagcttctgtgagcatcaagaagagagtagtggtctgggggagagcccaggatgagaatcttgcaaaaatacatccttcaccacaactaaaggcgaatcctctcctcttacatttccccactttcttcccacaccaggcctgggatctgcttagtccaaaatgttcctataagttagcaaatatctatgtcacatactctcgccaaaccagttttatgaaaatatttagactaaacaaagtgaagagaatagaaagctgtatttgcatgtgtgcagtttccttgatcaaagaatattaagcaaaaagagaccaaagcaggagtcactgcaatttaaatgtcgttcctgtctatttcaggacgcagctctactctgttttctttattcttggggtgattatgttgatgacctgtcttgtctctgttgagataaatttaccaccaattgagcactccttattggcagggattgggtgtatcaattccgagaactgtatgattgcaaaggtggaaagccaattcatcaggctattgttttgctgccccattaagtatattaactggaagatgacttcatttcaaccatttcaaatcttaaatacaacagattcagtcctttatggaatgagttaaggtcagaaaatctgtccatcgtctttctcataaatactttaatatcttccaagtatcattggactaagaaagtaattatgggtaataataaagattccaattaagaattagggcaacatgaaaatgctactaatttcgattcacatcgtagctttcaggtccttctcaatatgtttaattacttgtgagaaatacagaagtagtggctggttcggcaagcccatcaccttttatgagaagtagaagactcagttttatcctgtctgaacaggttgcattagccatggggaacattttgtttttgcattcacacatcagtctccccaggttctgtttacacagaggaagagaaagactggctagtttagtagtccatcccaacccaaggcagaccatctctgaggtttagtttttacagtcgtaagatgggaattgcatctgtttgcaaaaactactccaatatcgtcagatgaaatggtccaaggagtagaaattagcataatgagtcgctgtgcttcagagtaaagaagagcctcttcataaagactttttgttgttctttttttccagcttccttcaaaatgtctactgttcacgaaatcctgtgcaagctcagcttggagggtgatgtaagtatatcactttcactttatataatttttgcaagttggacatctctctggataaccatattactctctatccttgtacatctaaggaagatggggacaattcagacagtcatcatttggttctcctctttcttaatacttcagctgttcctagtagttcaatttgaaggaaatatcatggcactggaaacttttcttggcctcacattaaaattggacagaattagtgacactggaatggctggaattttattctgccatacttagcatgtcattggtaataactgttatgatggtacatgacttttaatgtcatgtcctgggattttattactggttggcataagccacagccatatcaaaactaattctgcatcttttggatttcttacagtgtccaggaagttattccagatgaagacttatacttttattttatttattaatttattcattttttgagatggagtctcactctgttgccaggctggagtgcagtggcgtgatctcggctcactgcaacctccacctcctgggttcaagcaattctcctgcctcagcctccccagtagctgggactacaggtgtgcaccactacacccagctaatttttgtatttttagttgagactgggtttcaccatgttggccaggatggttttgatctcttgacttcgtgatctgcctgccttggcctcccaaagtgctgggattacaggtgggagccaccatgcctggctcgaggacctatactttaaaaaatttcacacctggaaaatattttctctaaaaaagctaggatatttcttttaaaaaaccaagaatataatgaaattattgtaattcatctgtttcctttttttctgtggctattagggaatttagaactaaactgaattttctttcataggaaatatgtgaacctagaaattctgttgcatttgtttcttttttttacaaataaaaaatttaagctatatgtgaagttaaaattatttcaaatacttttagaatcaagtggaatataaattatgaatatgtaaaatagctaatggtactatacatcttccaggtcatcctggcagaaatggcttttacgcaaactcagcactgatactggtttgtagccatatccgacagatctttcaaaatattctttgattgaaattaaaatgcaatgaatcactcaacagagggttgacagtgacttgggtcacatggtgcaagaccctctgtattgttcatggtacttgccatcaaaatgttcaaattaatggagcctgtgaaagcacaggttgtatggagtataaagcctatagagtttttttaaaatcttttttcttcttgaaacgtgtgcatgctgtttttgggaacaatacaaactgcatgttgaagtcagacaaattcaggtgctaaataatttgtttctctaatggacttagattgtatttgctatcaggttttataagagggctttttgtgtagcctctgaagttactctagtatatttcttatgtgtggagaggtggggcagaaatagaaaatgtcacatgttccccattattttaaggaaagaaaagataactttgtctcactaatttcatttcagacaagtggattttataggtaataggttcaattctcgatttaatttcatttccagagacactataaaatgacacaaaacttttccccctcactgttgtttttggaacaagacgacatatctcctggtaaatgcagtcatacatgatatggctcaatgcctggactgcctgccttgtaaataaccgatggcactcttaataaatgggaaaatgtttttccttagatttcatccacattttatagctaccatagcaaacacactgagtatttcaaaatagcactttgcctttttcctgaatgtgtgctccatgtcatcaagttcatcttactggaaagtttaagtggtgaaattagatggaacatactttgataatgcattgcatgtcaggttataaatatgaactggatttaatatttggccaagatagtcctcacaagtgcgtttggaaacatttgtcaaatgctgaacttagatttctggcctctcctgggagtcatctagatataggaaggcatcttagatgctcacctatacagtctcagtgctaataaaatggaatggcgtgggtgctgggtggtttataatgtgatgcctgtgggtggagaagtaactcacggatcttggccttttcactcttcacagaaactgcgccaaggccaagtcatcacattatacgggcattatgtgctgggggggttggggtgggttgcaggatgggagccttgatgatgaggatgggcagtgatgctgcctccaccagccatcagccaaccacaaccacaatgtacatcctctttgtctgcccttagctttgggactgggtagcagggagagggaaaactataagagcatttcaaagaaggagggaagttaataccttgaaaggagaactgacgtagaagcactccattgtccttacctcaatctggaatgggagattcccatctgtcagatcaggaaggataatgagctttgaaaagcactgaaaggctgggcgtgagccaccacgcctgtaatcccagcactttgggaggccaagatgggaggatcactagagcccaggagttcaagagcagcctgggcaacacggcgaaatcctgtctctacaaaaaatatgaaaaaattagcccggtgtggtggcaggtgcctgtaatcccagatactcaggaggctgatgtgggaggatcatctgagcccaggaggttgaggctgcactgagccatgatcacaccattgcattccagcatgggcaacagagtgagaccctacctaagaaaagaaagaaaagaaaagaaaagcattgggaaaggaagagggtatggtttagaaggcaataagaaatcttaggaagagtggagggtggtaggcacaagggatggtattaacaaaggcagagggaaggatacagaggagagggggggaaacacaaggaggatgtgggccgtctggccagaccaccttggtgccacagtggtgaccaaagtaaagaggtgggagaagctgcttccctcatttatctgaattgtaagctcagcaacactggcccagtagaaattcatgtacctgtagcagaaacttagctaaacacccttgtccttgaggcatttccacattttcagcttatttcgaattgttgccagcccagtttaatggtcttcagagccatcctgagtaaatgctggcttcaggtctccagctttgcattgtctacttttgatctctcactaaaagtaagatgagaagttgaaattgagacagcatattctaaactagctgagcctttgaagaattcttattagaaaaaatgaaattgcttgcgtgaagtgtgatggtgtgttaatacctacctagttacctagtatgagaatgatctgaattgttaaaagaaacaataggaaaacatattaggcattgttatttcaacaagaggattttaaatgtgtatcatttgagtatgtttatcttttaacctcagcactctacacccccaagtgcatatgggtctgtcaaagcctatactaactttgatgctgagcgggatgctttgaacattgaaacagccatcaagaccaaaggtaggtgatacatttgtcctcttcttgtcagggtcttactgagacatttttggttgtctctttattctccctcaaatcgccatacgttggcgatttgaaattgtcatcgggctttaatggagtagatccagacctagctcaacccatgcctcctttccttccttccctccttcctttctttctttttccttttctccttccctcccttctccctttcttccttctctccctctttctctttctcccttcttcctgctcttccttccttcctccctccctcccctcccttctttcctttcctccctcccttccattctttcctcccccaccccccgtttcttctctttggagagatgtacagcatgagatagtattttaaccaagtaatggttaaaaggaatcagtctgggagccggatctggtcctaggggtatgcttttgggtgcagctcttcactttgaggcttcagtccctcttctgcaaggaagaagttggtcatagtggtccctaagggcattttttgttccaagtcccctttaatttaattacatttgctgggaaaatcttactgcattgctcttagattgatctagagagtgaaaaattcagactttttttgttttttttaaaccccggtaagttctgctgctccttaggcctggagctggaattagaagagctgtcagaatgagtgtatttcctcaagttctaggatgagtaagagaagaccaggaggcgtaaaagccttcctcttgaaataaagcaaataaagtgctaactggttagggttgagcaagagcttcttatggtcattatattgttttctgggtctacaaaataggatgttcagactttctgggcttatattaattaagcaatccttggggttgtcccatcccctgaatccctgaaaaatattgcagctctcgtggtgacttttgtgattctccacttttccccccttggataaagcacttcctttcaccatgaggccagattgggatgcagacgtgacccagcacaattagagctgctgctggttcgtgcccctggtgaagagccatgtcacatttttctcttctatgtacagcgttttaacttactgacacacttatatagttcacatacggttcgttgaaagactgagaaacctcaaccaggctgacctgggaacctataactaggatgacgtcctggtttatgcctgcgtatttactaatagtgcacctttcactctcagaactgtcttattttggaggatacattacatggtcacctttcctaaaaccatgtagaatctggtgaccttgtttccagagacaggaagtagagtagaaaaacccgcttaacgttctatggttctaacaagatgtgaggatttatttgcatcatctgccttggggaagccttatgttctgcagttgctgtggaccaccccccagatgactgtctgcacagctgagggcagaataatgaagcatccaaattagacctttaaaaaaaaaatctttttttttttttttttttttgagatggagtttcactcttgttgcccaggctggagtgcaagggcatcatctcagctcactgcaacctccacctcccgggctcaagtgattcttctgcctcagcctccctaatagctgggattacaggcacacaccaccatgcccagctaattttctgtttttagtagagacagggtttctccatgttggtcagcctggtctcgaactccctcacctctggtgatccgcccgccttggcctcccaaagtgctgggagtacaggtatgagccgtcgcacccagcccaatcttttttcttttttttttttttttggtgcatttaaatgaccattcttgccaaaagttactactcagaaaattaaactaaaatctgcagggcttatttcactacagccagttccagtcagtggagcatagtggatgagagcgtatgtgagcccaggttcaaatgctggctccacaactcactcattagccacccgacttggggaaaacacggaactttgctaagactgagtttccttgcctataaaggggtgctaatcaaagttcccacctcacgggattgttgtaaagtatgaagcatttagcacgatgcctggcatatagatggtactcaaaatatgttaccttaaaacacacacacgtacaagcacatgcacacacacatgcacatacacatccatgtggtttgctttcctaaaacccatcctatttcactatttggatgtgcctagattcatgtggtttcccagcatgtcattgcagcagccctaagtttagcagttaactcatctagcaaagatggtgcttttcacaagcatgggacaaagacttcttttgtccctgcgtgagaaagcacttagtgcactggaatgtaaagattgcgcaaatgaactctggtcacagctgaaactctcatggtaataaaaataccttcaggccttttggagttagtagaaaaatactgtagtttttagacagaaacgtctggagggctaagatttagattccgacattccagtttgatcaaaagcagctgacattatcatcattgcaactatttataaaatgctcgttgtgggcagatactgcaccaggcacttcaggaacattcatcttagatgaacttcaaagtaacctctgatgtagtgttctgtcatccccaggtcttggatgatacaagtcaggattagtatgcctgaggtcttttggccttggatcaaactgggatttgaacacacctctgtccacccctaggcctgtgttcttaggcaccataatgttgtagcactcacctgtgaggaatggatttttttcattgccttggatttttttcattgccttgaattattttcagatatgaaaaacattgttcatctgtggtcttactgacttctgttaagtctcatatttgtggtctagctttagattctccatctccttttttttcccccagacttaatgttcagtgagtttcacttaggtccactttttatttattttatttttattcatttatttttttgagatggagtttcgctgtgtcacccaggctggagtgcagtggtgtgatcttggctcactgcaacctctgcctcctgggttcaagcagttctctgcctcagcctcccgagtagctgggattacaggtgtgcgccaccacacctggttaatttttgtatttttagtagagacggggtttcaccatcttgggcaggctggtcttgaactcctgacctcgtgatccacccgctttggcctcccaaagtgctgggattatagccgtgagccaccgcgcctggcctatttatttatttacttatttatatatatattgtaagacagagtcttgctgtgtcaccaggctggagtgcagtggcacaatctcggctcactgcaacctctgcttcctgggttcaagctattctcatgcctcagcctcccaagtagttgggactataggcgtgtgccaccatgcctggctaatttttgtatttttagtagagacggggttttgccatcttggccaggctgctctcgaactcctggcctcaagtgatccgctgacctcagcctcccaaagtgctgggattacaggtatgagacaccgcacccagcctacttatttttgatgcttagtgattttagagagtaagtaggttttgcaagtccattggtcctttaaaataatttctagattgttggcattattaaaaccctaaatccttttaggaactattgcgaagaaagaatatgatattcgtaagagctcagtgctaatattagcattggttatggtagtgaaagaccagataaatcttttagttgggaagtatgtcttgaggtatacttccttataatcattaagtaaataagtaaaactatattacatagataatgtgtaactctctgtattacatagaatgtctgcagaatgtagataggaaaaataaagtttgtcaataattttcaacatctttattgagatacagttaatctgccatacgatttgcctatataaagtgtacatttcagtgtgtttagtagtgtatttgcagagttgtgcagtcatcaccacagtaacttccctaacactcattttaacatccattcaccttaaatgtgtcagttgcatcaagaaatagaaatgggatggtatatgctatgtgatcacaaccacaaccattttttttttctttttgaggcggagtctcactctgttgcccaggctggggtgcagtggcatgatcttgactcactgcaacctctgcctcctggcagaaccctcctgggttcaagcaattctcctgtttcagcctcttgagtagctgggaccacaggcatgcaccaccacacctggctaatttttgtatttttagtagagacagggtttaaccatgttggccaggctcgtctcgaactcctgacctcatgtgatccacctgtcttggcctccgaaagtgctgggattacaggtgtgaaatcataggcctggcctatgatttcttttaatcaaaaaagaaaaaataaaaggcattagcaatggaaacagacgtacgtcacttcatggtccttcctttactgcactgtgtagatattatggtttttacaaattgaagatttgtggcaatgctattcactttgtctctgtgccagcattttttagaaataaaagtattttttaaatttagttatgtcttttttagacataatgctattacacacttaatataatataatcacacttttatatgcattgggaaaccaaattgtgtgacttgcattattgctatatttgctttattgtgatggtctggaaccgaaccagtagtatctccgaggtatgcctgtatatggaattgtgggcaattgctccttttcctttcttgggctttcagtatattctgtatttctgtattttgcaaattttctatgatgacttgtattactttcatagtggaaggcagtaaacttaattaaaaacaaaaatgaagtcattagttggaaaggataacaacccttttgttccttcctccttctccttgatattattagatactggataactaaaaccacttaaaaatgagctaattaagatcttaccttctttttttagaatgccttttgccttaagtgtaattaagaagcttacaccacaccttggccccactcccacctctaacccttcatcgggaagagacaatactaagtagttggtgtttccttgacatcaaaggacacggtataaacctcaagtattgatagaaacaaaagccagaggaccatgtgacgatgactggccctctttctctcctagacgggggtagccgtgtgtacacacgtgtgtgtgagtgtgccgggacgctacccactccatgtaatgttccattgatttccctgtggtctgtgtgctctcaggaagaagagctgggagcaggccaccttggaggaggcttaatcagctgctgtcgagtacacggatggtgcacaggagcaggcctggagtgggatgatggcgaggagggtagagctggtcagagacctgtttgggggcactgcttgccatggccagggcatggctgcaggagtcacgaaggctgttctcacagacgaactgtcagtcacacctgctcttcttggtgtgagctaaagctcctcacttgcagccctctgttagaggagagaggctacttttcccagccagtctgcctcctggcaccctcgagagaatatattcctaattgctgtgctcaactgaatgaatatacctccaggtgtgcagacaaaaccaaaaatacctgtcctggctcactttccagtgcttgggaggcagctcttattcaccccttcccctaactcttgtcacccctctcctgtgagctgttatggcatctgtcgtcgtcgtcttctttttttttttttgagacagagttttgctcttgttgcccaggctggagtgcaatgcacaatgtcggctcactgcaacctcgcctcccgggttcaagcgattctcctacctcagcctcccgagtagctgggattacaggcatgtgccaccatgcccggctaatttttttttgcatttttagtagagatggtgtttctccatgttggtcaggctggtcttgagctcctgacctcaggtgatccgcctgcctcagcctcccaaagtgctgggattacgggtgtgagccactgcgcctggcctatggcatctgtcttctaagggacctccctgcttcagcctttacagagtatctttctagcctcgtctctggctctgttcacggccctctacagagcatgcctctgcctttgttctttgaggagcgtgtagcctccttcctccccacctcaaacatctgcgcagttcccatttacctctcagcctgggccagtgcacagcatcaacaagctttctctgagaaggcagaaccagctatttcttggtctgtgttctcatcatactctacatactcgtttattgtgcttatgagaaggggggagaagcacaatactgctaaaatcaaaataagtctgctttgtttctagtttgaagggatctcagtattttttgcctgtgctgcctaaaccaaatgcaggattgttttatgtatgctccgtcctgaggtagactatgcaacgacttaccttaatttatgtctggttagaaactgagtacagtcatgcaaaagtagtaatactgcttaattaacaagaggttgctgagacttaatctgtaggagtctcttggtttagattggccttgggttaaatatatacgatggcgtgtacaacacagctgtgaatggtttaccatatgggtccaaataactagaaaggagagtcagctaaattagaaaaggatgaatcgagactccagaaaatagactgtaattagcagcagcacaaccccagagttagtgtaagtgccaataaactggtacagctttggtctctctctggaaggggagggtaatgaattaccctattattattgccagttttgattttagcagtatttgtgttctccggaagggatgcaaaagtgggtgatttttctcccccctttctcagaagcgcaagtatagaagcataactgcacgaagttttgcacttatttttttcttatacttttaaaatagaactgcttaagatttctgtggccaaaagactaacatcccatgccactgcagaacaagccaggatggatatttttggtttcacctgcacgccaggtatattcatttggctgagcagaacaattagaaatatattctcttgagggcgccaagaggcagactggctgggaaaagtagcctctctcctctaacggagggctgcaagtgaggagctaaaccaacaagagcaggtctgagtgtgagctcttctgtgactcacgtagcccagggccttctcaccctcctggaagggaacgggagggaacggacccttcccagttgctgaggcctttctctctgtgttcaagtttactttagactgacttctcatcttacagcagtgctgggaacaaagaggccagtgctgagtcacagccaccctgtgactctgccagcacagattttctttgtagtgatatttgtctatgtatctatgtaggtgccagacctgagccacgtagctatcaaacactggaaaaggagtccttggtgcctttctaattgtaagcatcagctttcatcacctgcctctcttcagctctttctttttttaaaaaacagttagctcttttccctgaggaaatccaaataccagtttcacccagggacaatggcagtaaccagattctaatctggtgtcagcaatgccaagaaaattctccaatatcaagtgagttaagggtggctgcgttggtttctctcgcatctgttcacattttttaattttctgtcccatgaggctgacggagtagcagagcacaatacagggcttgcattttatgcatgttccttcactgacgatttgatttgaatcttgagcagtggtgtactttgtgttttcctgctggtcttgtagcttgtttcagaaatataattctgcatggaaggcagacaaggttctagattattaaagcagccggtgagattaccaagtcgatgataccttaaatcctttctaaggaactcagctgaagtgagatcaaagcagaatggaaatagaagaaatctgatttttggaccaaaaccacttcttaggcacttagctaaactacactttccccgagttgagactgtgtgccccagctgtgccagacttgggagaggcacccaactcccctgcctcatttcaccctgtgcaatgcctactttctctcccatctcttggcagctgccagagtttgtcatgtaactggactactcatccatgtgtgccaatggcaaaaatgttctctatctttctttgccccatatttcacaggcagaaattcaaatgcaggcaggggccaggcttgtgacagagaagctgaatgaaggcagtagatgtgtttctagtcgttaactcagccagtcttttctgcatcctggtaaaataagtattatcattatctctgttctataggggtgagatacctaggcctaggaagagaactaatgtgccccaggatctcacaggtctgagtcccatggagtttccaaagcactatattgtggctgctacttatccagaggcctcccctggcatctgtcagcctgctgggtgtcctgtcttgatgagagacgctctggagacacagtgctcgcttgtgctggatgacccagaggggcaacttttacagcaggggttccgggccagccagcaccctggctgaaggtgcttttgggtagtcctatggctagaggggagcttttctctccctaaaaatctctctcactagatggatgactggctggcctaacaggcttgtttggaaggacttcctccctttgctgagttattcatgtctctcctcagaagagagtcttctagctctttctgctgaagaaaacctcaactgggttatccctttagtggccatgcattattaccaggtggcaaatcattatctacagattaccaaatgtaagtgcatttgtatgtaaaaatttcagcccagttctctacacgtgttgacacattattgtaccatatcctttgtaggagctagatggtggagtgtggtatgaaaaagtatcaaagtataattttaaaaaggtacaaacttgactcataggataaacatatactaaatttttaatgcactgaggtaaggctggttcagagggaatttgagatactggatgttggtaagtgttgagaaaagaatgttggaatgagattgttgggccaggctgggtgtggtggctcttgtctgtaatcccagcactttgggagggcctgggcaacaaagggagacctcatccctaaaaatatttttaataattagctgggtgttggtggtgagtgcctgtgcttccagctactcaggaggttgaggcaggaggatcatttgggcccaggaggtcgaggctacagtgagccatggttgtaccactgtactccagcctggtcaacagagtgagaccctgtttaaaaaaaaaaaaaaaaaaaaggaaagattgttgagctgaatacaagaccattaatgtcctatagggtagtgaagccacaacctttggggttatcttttctactggaccaaaatctacaagttaacatgtaaccccacagagtgtatgcccaaatcagtagtaagtagcacgtcaggtaagagcaggccccttgagcaggagtctttgggcctgtgagatagtgctccagcacatacctggaggatatgctgtcttcctcttgctttattttcaagttttgcataattttctatcacaggaggcagagttgcctagtgcagtgagccagggtctttagtcccggtttgaatctcagccctgcaagtgtcttgcttgtgtgaccttgagtgagtctctgccttctatgagcattggtttcctcattagtacaaccgggatgacaatggcacccacctcagatgggtgtggtgagaagtacgtgatagaatatgggcatctgataaaaatgcctgtaacatagtaggtactcagtaaaaggttactattattattattattattttgagatagagtttcgctcttgttgcccaggctggagtgcaatggctcaatcttggctcacctcaacctctgtctcccaggttcaagtgattctccagcctcagcctcccgagtagctgggattacacgcatgtgccaccaagcctggctaattttgtatttttagtagagatggggtttctccgtgttagtgaggctgatctcaaactcctgacctcgtggtccgcccaccttggcctcccaaagtgctgggattataggcgtgagccaccgcgcccggcaaaaggttactattattataataaatgaactacgtccacgtgtacacacccataactctgtggcattgtcctctctttgtggcatgcctctgaccttcttttagtaaagatgatttcttctcagctttgatactggtatgctcagtaatcttagtcaagtcaagtcgtggtcttccccataatctaggtaaggagaggatctggacagttttcctttgttttccaagtcaacccccactctcccgagaccttcatcaaacacaaatgaaatccattttctttgtgcagtcagtgtgtctcggcagatgtgagtcagcatcctgttcagaacggctgttggtgccttgccatggacaataaagacacacattttccatggaatgccaggcgcttgagctgacttggggtttccacccgcagagaggaggaggaaactccaggaggctgattttgtggttttggatccagccatcattttaaactgcaaatattctctgtgcttgaaaaatatggtgaatgatttatgggacccatgacccccaggtttctactggcaccttgctgtcagcaacacctccccgtggcattcccttggcaaagctattgcttcggactgactggcatttggaacagtgactgacctctgggggtgcccacgatccaggtgttgaaaatattgttgtagttagctaattagattagttggctattttcgttcaacgagtaaatgcttaaagatttccttgtgctgtttcttatcaggagccaaatacatttgtgtcttggttcctcaccaatgttggaaaactgtaacttctgttagttttgaaaaaaaattgtaaaaaatctgcctggatcacagaattcatgttctcacccatattctgtggggtcaccctatccacatcactcttctttggggagagcctttgcttagatgactttgtgatcactcatatcagacacacgaggaagaggatggaaaagaaagtgatattcaggttttctgtttcttctttatgccctcgccccacccacacagtttctttagaccctgtgcccttccgcccagcaaacacttccttaagcactggaacacgagaggtcagagagtataaatcaagggaggcagagccccatctcctgggcctctggcactatattcaatttagagcttttctggtgtcctggcactggttgtgcattgttgatgatgattgtgctgacataggtattcgaggttccgtccgagtccttcagttgcatcctgggtagaaatggtgagtaaccggatgacccttgcaacctcaacctgtactgaacaatttttcacaggaataaatggcctcaccaattacaatagcagggcaagaggaagcagcagtgttctaaagataagatggttcaatcccatttgcagatgcatgtatttggtattacaatataggacatgacttaagtggctttgactaggcagttgatcctggctccatgattttttcctctttccagttcaatttgaaacatgcagacagtggtatgggagaaatagctgatgcaggtgaggttcttgggcagggcggtaggaggggaatcttctgctggcagaaacagcctccatttcatttctttgtagttagtggcattagcacttgtgcaatgcattacggctgttcacttgtaaagtcccagcatgttagatactgcatctcagctggctgtttgcttggtaaataatttaggtaaaatacattttgattcctttagactatggttgttgctgcctcctaggtaagattcacgttaaccacccaggctctttatggggatctccgataattggattaaattctatcagtgctggctggacacttagctgctatggaaagaagggcaaaaagctgtgtcgttggctaagagtgtgggactgcattgcggcttgtggagtgaactctttagatgttacttcttacctgggttgtttggacaaaagtaagcacttcttttcctaaaattgtagttgatcctgtacctcacaaaagcagttggtagaagtgacatagaagtcttttagataggtagatttctagagacatttccatttcccaccatggttatccatttctgttggtgattctcaaataaggaattactagggagtttgttgaagtgctgcttcctcggtcccaagttctacagagccttccttagtagttctcaggtgcagcctaagggactgtgtttttaataagtgcttcacgtgattttaatgcaggtggggccaagaaccacattctgacccaaacacagactttgcatttgtttttaagagagaatacttttttatgggtcactgttcttggtatgccttcaggccagcggcccctaggttgacttctggaagtattagaattgaggttagaggatagaattgtattttgtgatggttcttcagtattttcagttgtgggtaataaaattaagtacaaggcaaaacacgttaataaacaagtggttttcctaatagaaacctagagccatagaattttgagagacagagcaagggagcaaacgagcaagcgaacacgcatgtgtgggtaggcatgaatgcacagcagcccaggcacacgtccactttgtgggtattttagagtctttgaatcaatctcttctgcccgttcctaaatgaaacaaaatataagttaaagcttaattatatccattagtgttttgtggaagcagaagtggggggtcattgttcaagcccccttcttgtgcagatatagaagctgagaccccagtaggacaaatgtttacacacataacacatacagggatgggctgcagtccctctgagctttagagcctccacttatgaaatagaaagagaaatagctatcccctcttggttgttatgaggattaaataacatagcttgtcttacgatgtttggaaactgaagagaattatatagatgtaattcctaattaccatgcatactgtgttttctaactgaagtatttagagttatacagggactctcttgaagtgaagtcactagtcgattctggagcaatgactgcctgccactcaccgggtattaaaaaaaacccatttatggtcattatggtgaactttgaaagtacagataatcaaaagaaagattatacataatcccatcactcacatgatcactattaaaattttgatatagagacttctaggtattttcttatacgtgcatacacattttacaaaaatgagagtatacagagcatactgctttgcaacctttttttttttttacttaacagtacctatattgtggatattttccaacattaattaatacttccatgccatcattttaaatgactgcatagtatcccattacatggaaaaaagaacatttaatcagcctcttattggacacaggtgttttttctactttacttttcaatattgtatacaatgctgaaataagcatctttgaagctgaatctcatatccagcaattggatttctttttattttattttattttattttattttatttttttttttattgatcattcttgggtgtttctcgcagagggggatttggcagggtcataggacaatagtggagggaaggtcagcagataaacaagtgaacaaaggtctctggttttcctaggcagaggaccctgcggcctcccgcagtgtttgtgtccctgggtacttaagattagggagtggtgatgactcttaaccagcatgctgccttcaagcatctgtttaacaaagcacatcttgcaccgcccttaatccatttaaccctgagtggacgcagcacatgtttcagagagcacagggttggggataaggtcacagatcaacaggatcccaaggcagaagaatttttcttagtacagaacaaaatgaaaagtctcccatgtctacttctatccacacagacccggcaaccatccgatttctcaattttttccccacccttcccgcctttctattccacaaaaccgccattgtcatcatggcccatccccaatgagccgctgggcacacctcccagacggggtcgtggccaggcagaggggctcctcacttcccagtaggggcggccgggcagaagcgcccctcacctcccggatggggcggctggccgggcgggggctgaccccccaccaccctcccggacggggcggctggccaggcagagcggctcctcacttcccagtaggggcggccgggcagaggcgcccctcacctcctggatagggcggctggccgggcggggggctgtcccccccacctccctcccggacggggcggctggccgnnnnnnnnnnnnnnnnnnnnnnnnnnnnnnnnnnnnnnnnnnnnnnnnnnnnnnnnnnnnnnnnnnnnnnnnnnnnnnnnnnnnnnnnnnnnnnnnnnnnnnnnnnnnnnnnnnnnnnnnnnnnnnnnnnnnnnnnnnnnnnnnnnnnnnnnnnnnnnnnnnnnnnnnnnnnnnnnnnnnnnnnnnnnnnnnnnnnnnnnnnnnnnnnnnnnnnnnnnnnnnnnnnnnnnnnnnnnnnnnnnnnnnnnnnnnnnnnnnnnnnnnnnnnnnnnnnnnnnnnnnnnnnnnnnnnnnnnnnnnnnnnnnnnnnnnnnnnnnnnnnnnnnnnnnnnnnnnnnnnnnnnnnnnnnnnnnnnnnnnnnnnnnnnnnnnnnnnnnnnnnnnnnnnnnnnnnnnnnnnnnnnnnnnnnnnnnnnnnnnnnnnnnnnnnnnnnnnnnnnnnnnnnnnnnnnnnnnnnnnnnnnnnnnnnnnnnnnnnnnnnnnnnnnnnnnnnnnnnnnnnnnnnnnnnnnnnnnnnnnnnnnnnnnnnnnnnnnnnnnnnnnnnnnnnnnnnnnnnnnnnnnnnnnnnnnnnnnnnnnnnnnnnnnnnnnnnnnnnnnnnnnnnnnnnnnnnnnnnnnnnnnnnnnnnnnnnnnnnnnnnnnnnnnnnnnnnnnnnnnnnnnnnnnnnnnnnnnnnnnnnnnnnnnnnnnnnnnnnnnnnnnnnnnnnnnnnnnnnnnnnnnnnnnnnnnnnnnnnnnnnnnnnnnnnnnnnnnnnnnnnnnnnnnnnnnnnnnnnnnnnnnnnnnnnnnnnnnnnnnnnnnnnnnnnnnnnnnnnnnnnnnnnnnnnnnnnnnnnnnnnnnnnnnnnnnnnnnnnnnnnnnnnnnnnnnnnnnnnnnnnnnnnnnnnnnnnnnnnnnnnnnnnnnnnnnnnnnnnnnnnnnnnnnnnnnnnnnnnnnnnnnnnnnnnnnnnnnnnnnnnnnnnnnnnnnnnnnnnnnnnnnnnnnnnnnnnnnnnnnnnnnnnnnnnnnnnnnnnnnnnnnnnnnnnnnnnnnnnnnnnnnnnnnnnnnnnnnnnnnnnnnnnnnnnnnnnnnnnnnnnnnnnnnnnnnnnnnnnnnnnnnnnnnnnnnnnnnnnnnnnnnnnnnnnnnnnnnnnnnnnnnnnnnnnnnnnnnnnnnnnnnnnnnnnnnnnnnnnnnnnnnnnnnnnnnnnnnnnnnnnnnnnnnnnnnnnnnnnnnnnnnnnnnnnnnnnnnnnnnnnnnnnnnnnnnnnnnnnnnnnnnnnnnnnnnnnnnnnnnnnnnnnnnnnnnnnnnnnnnnnnnnnnnnnnnnnnnnnnnnnnnnnnnnnnnnnnnnnnnnnnnnnnnnnnnnnnnnnnnnnnnnnnnnnnnnnnnnnnnnnnnnnnnnnnnnnnnnnnnnnnnnnnnnnnnnnnnnggggagagggagagggagagggagactcagcagcaattggatttctatgtttaccttggctactctaaaaatgagagctaaagttatagatgctacagttaagatagcaagcatattggtatggacttgctttgaaatgagcatatacattttaaaaagttatttatttttatacccagaaattctaactttatactttttgatctaacacacttgagaattcaaaatacttcctctgtcaatctgctgtttgtctttgtctcaagcgttacagttttgacctttctgtttcttcaggactcctctgattttcttcaggccaagccatttgtagtttgcaagtgactttgtaggtttagcaactctactctctcacccaagagttacctatccagttatggcaaagactgtttctttcattaaacaaagttattaatcagtcaggagagagacttttcacattctgaatttacaaactgtgctttcttaagttaaatggcatgttaggagtatttctgatatgaaattggaaacttgcagacaccagaaggcattgcttatctttgtaaatacacatgttccaattaaaataggtactaaaatattttggtggcacctcaaaactcccaatttagatttaatttagattaaaacacttactctttttaataaagttataaaattaattattaaaattgcctattgaagattaaaggcagtggaacgtttattttccttacaaaacaattttgtcttcaataagtgtgattgtgttaatcaattatgctattaaaaatacaactgccggccgggcgcggtggctcacgcctgtaatcccagcactttgggaggccgaggcgggcggatcacgaggtcaggagatcgagaccatcccggctaaaacggtgaaaccccgtctctactaaaaatacaaaaaattagccgggcgtagtggcgggcgcctgtagtcccagctacttgggaggctgaggcaggagaatggcgtgaacccgggaggcggagcttgcagtgagccgagatcccgccactgcactccagcctgagcgacagagcgagactccgtctcaaaaaaaaaaaaaaaaaaaaaaaaattccactgccatattaaatctgactcatttgtcatgacagtttttataattatagaaattatacctagctgcttatatagccataatcctgcaataagtataaataattatctctattaattcagtttgcagttactctctattaaatcccgagttaaatggcaatttggggaccttcatttaaaatcctactaaatctctgttgttccatctgactgccaaagccccacatatgcacctcctactgttgattccagaaaccaatttatgaataaaatagtttttaaaccacaagtatttaaaaggtccatttaagcttgaggtttgaggctctcaagaaaaaaggaaagagagtgtacacattgggtagaggatgctgacgaaagagatagaacaaatcttggtgtctgggtatttcagtttggaacacagtatataaatttcagtttgaaaaagtctgcttgacaccttctatgtaagcccaaaatactagagtatactgagtaacgattaacaacttgtatttccataggtgtggatgaggtcaccattgtcaacattttgaccaaccgcagcaatgcacagagacaggatattgccttcgcctaccagagaaggaccaaaaaggtacaggcaattccagggatggagggcatttcttgttgaatttttgtttcctcagacattgctttttcttttcatgaattgtggctctcatgcgcaaaagacttgtgggacccttggatatctaagattttcttcttaaatccttgtaagagtcactgcacatgtgtgtgtgcgtgtgtgcacacgcgcgtgcacctcaggtcatcaggcattaggttctcataaggagtgtacaacatagatccctcgcgtgtgcagttcacagtagggttcgcgcttctgtgagaatctcatgccaccgttgatctgagaggaggcagagcgcagatggtcacgctcgctttagagtgcttgggagctcctgtgtaaggacagtaccctcccccaacccaggctacctggagggagagcttctgggaatagaaagttaggaatagggaacaacaacaataacaacaacaggcaccatttattgagtgcttactttgggccaggcactgtgctcagttttgtacatgtagcaactcatttcatctttatgacttctgctggttcttgataagatgtttctaatttaattttaggatactagcctccactgagtgttgatcctaacaagctcctctcattttaaaaatatacacttgaattcttaagctttttgcaacgagtgggcttagttgttagttcatttggtctgcaaagctatcttcaacatgccatgctcctactatttaaagggtctttgtgtgctttttccctttgcttgtccactagtggttaagaaacaaccagtgcgtgttcgtcctttattttgtcagttgtaggaaattttatttttaaggacgtgctgctttatttttaacttcttgctattaaaagcttttgatttattcttggacagtgcagtaagtgtggcttcctgcagctcccgtttgacttatggctttcacttgtagccacagtggaggtgagctggaaggattctagaagagatatttctgcccttgggattgacatgaccagcagggtcctgggagttgcaggtcaagccttgctacacttccatcccccgcactctaaatggttggaaaggacataaataggaaagcatctggcttctttcatctcaagtgcattaaaattcttctttcactagacgtgtattaatcttgtgtagtgaggcatagaggggagtgttttatttctccagcttcccaaaggggtctgtgagctggtagagccaagttcccagtggagcagaaggctcatctctggacagcaagcaaaaaatttgatctttcagctgtcacagagtatggtcttggaatacatttgggtgtgtacacacacacatagaagcctgaaactttttttttttttttttttttttgtgacagggtcttgctctgtcaccaggcttgattgcagtggtgtgattcggcttactgcaacttctgccatgtggactcaaatgattcatctcagcctcccaaactgctgggattacagtcataagccaccacacccaaaacctagatcttggttttagattagatatatgtagaacaaagctcccacgtaccctctaggagggaagatattaccagaattatgatgaggtcccaagatctcacaggctttgctgtgtgctggggacagctcatcatcctactaattcttgactctcagccttaggccaaggagaattatgtatcttttataaaagatatgtaaactacttgagatagtttcaagtgaaacaatcggctgtttgtgaaataaagaagaaaatttgtgaaataaggaagatttgtgctgcagagttctttagggatacgggctgcagctgcccaggtgatgagcttgaagaacctaggcccggctggcagagtggagaggagctgggagagacagctgcttttacgactctttcatgttctagcagatgccagatgcgaggcttctccttacagggaagggttatgtttgatttatcatacatttctggagtttttgtttagtttttgttaaatgcaaagctctgtgctggacattgtgagaaacaggaagttgaacgcccataaggagtttagaatagaagtggaagaagtcagtaggtgcccaaatgctatttgaggtttgaatagagaatgggtagaggggagtgtcaagggtaggctaagtttggagttacctaacctcaaagttccaaactgggagactggtgttataattgggagctactgcttttacagtcccctcctaagtgccgtgtgttcccgggacattgggaagcaggagaaaatgggtggtgaaagccaggtggcttctaagatccatgtcagttctaacacttttgacatctacgaatgattcagcatggttgtctctgaagcatgctgcaaatcacctctcgtagcctgcaagtacctgtaggggctaagctttgtagatgccacaggtgctcttagaaagcaaggaaagaaagaagagagagaagaaaaaaaaaaaagcgaaaagaagaacattatttcagtaggaggcttcagtcatcagccatgatttgtaggaagtttagctcgaggaagcatcgctaaaagacacattgagttggggtgtctgtctacatacatgggtgctgaccagacctctgacaaatttttgtgttcatggtgacagtggatccaacccttaagaaattacatgcagcagggaattcaagggggccagttcgggggtgttagtttcctatcacttccattaaacaccgtccgagtttggtgtggacaaggagatattttctcagtattagatgaagtgttttgcataggaaagtttcatgacctcacttccaactgtgttgcggcctctggttccttctggtgactttgaggagctgccgctggaatggctgcccccacgtcttttacagtatatcgggaggccacaagatctgcttgccaggaggctgtctgctcaaacatctccttcttagcaggggccttgatctccgaaagcgtcctgccttccacggagtgttactgctttcaagcatattgcaaagtgcctgcactctcacagctttcttaggaatcacatacgactccagtttccttttattgaccggggaagacggcaaaattaacttggattttaaggaatttcgttgaagcaaagcctgatgtttatgtttctgagatgtgggtctgttgaagggaatgcagttgagggcgtttgacccaagactccggagtggtcaaagactcacaacctgcttcacaaaaagatccctcttacttttgttttactcactagttttaaagtaaaataaatattttccttatgattgcctgttatcttgaaggaacttgcatcagcactgaagtcagccttatctggccacctggagacggtgattttgggcctattgaagacacctgctcagtatgacgcttctgagctaaaagcttccatgaaggtaaatgcatgtgagatgtcatctctgtcaaatctgctattaattttgtgaattacagctttctgagtgtaatttggtgattttcagttttgttgaattctcatttggaaccattttttaaaaatgaactgaagttatatgtctcaggatttgtaccaaaaatatttcaattacttgttttaagactgtaaagaaatttcatgatgctgagaagtcagttaccagctgctactactcagcacctgggcaattggaataccatttgggaaaactacttccttgattacacttcctcctttaaaaagatatgttgtgatattaaggcaagaaaaaaaaactcatagcttttgttaagtgaagcttgcaaattctgcccatcctttcgtgggtgtttcttcctcccatactctctctgtcagtaccatttgtttcaaattcaggcagaatcagaacatcatagtgcatataaggggtaattctggatgaagaatcgtacctgaatcgtacctgtgagaaagtaactgtgaagtctcaatgcacgttatcttttatgtttttcttttgtaaagttcttttgaacctggaattttaggttaaattaagtaaaaactgtagattggaaacctcctgaactttgtgcatacttaaaatatcaagttttttgttttgttttgttttgttttttgagatggatttcgctcttgttgcccaggctggagtgcaatggcgcgatctcagttcactgcaacctctgcctcccgggttcaagagattctcctgcctcagcatcccgagtagctgggattacaggcatgcgccactacgcccagctaattttgtatttttagtagagacgggatttctccatgttggtcaggctggtctcaaactcccgacctcaggtgatctgcccaccttggcctcccaaagtgctaggattacaggcgtgagccaccgcgcctggccaacatcaagttttatataaatgcaatagatgcacacacattaatgtatgttgtactgcaacacatttggacccttttcttagtgtgggtctgcagcatttgaacagtccgacactgccctctgctgatatacatgggtaaagtctgcgctgtagatgagggaaaccattggtcttgattttttattccgagtctgttttctctgatgccactgttcctgaattatgaacagtctgagctgtaagcctgtcaccagagctaatgtcacagttcagttgtcatccttttcccagagaacacaagagtgagggtgcttcggacactgggcatctccaaagcctggaatttgatagctcagggctgctgtaagatttgttgttaagtctctttcttcctttagttcttcagcttagcccaagctgtgctcagtttattttagcggacttgtctgagtttcctaagtagactgtactgcagaaaagacgtcattaagaatgataaaatgtcgacaacatttcatgatcctggttgataaaaatagcgctcctgaaaaccgagtctgtggacctttggaggcagggatgagtcagcctctcctaggtttcttctgaccatcaacacttcagatcagtttgtcttattttcatcaagaatctatttagttgtgattcgagtggctttactggtatctattactaggtattagggacttgaaacagacctttttgagctgtcagtcactgttgtaatctatgtaattgggcccaatggaaggtgctttaactgctgaagctttgaccctgtgccagctcttccattagctatcacagttgaatacccgtccaaaatccataaagcttgaagtgacattaactgaactatgcttaaaaaaaaatctgttttgacttctggcagtaccggtggcagtatctgccatatgttacagtagaatttgcccttgtgataggaattgtggacagtctgtggagagtttgggccgggctttggaaattgccaaggtcacctttgaatgtagacataaaaacactattggaattctcagatattaccactggtatatcagtgatggaaggaaacacatcttacattattctgcctgtcttgcaattctacaatgtcaggatataacatttctcccactgtgtgttatttttacactatatttctatcatccttgagattgaacaactgcctctcaaaatattcaaagatactcggtagtcatttaataacatttgtgtagaatgctgtatggaccttttgctaacaaggggagaatttttggctttgctggaacctctacaaatcatgattaaaaactcagaaagaagagccattggctcaaaggttagatgaagaataaaattcaaaattaaccattaacctgaggcttagcttatattatacaaactactttttcggggcatataaacgctaataagtttaattaatagctgacacgcttttcatgtgggtaagtttcttattgtattaacaccttataattgatttacattttaaacagttgtaattctacttagttcaaagtgatagttccatattcggaaagacaagtattaaagaatcctgattattaaatcttgactttgatcatgaagccagctttgaaatacatgtttcattgagtcctttcaagctatctgacatgctcaaaagtgtatatattaaatttgaatacatcacccatcaaattcttattccttaataaagtgttggtgtctaggtttatttggcacttcattatttctttttgcttccctaaagtgcctgaagagtgcataattatcaagcaaaaatggaaggacaagaatgaaatttttaacattaacccaattttacatttcaaagagtgcagctaaaaattttttcttaactatacctttgcctggtaaaaagacttactctaacaatgctggctgcaagtgacaacataaaatttctgtattcctttattttagcgagaattgtttaacaaagaaatttctaatctgttaaaatagtgagtggttattgtagaaagtgaaaaataataataagaaaaagttactttatctacccacagcaaaaggcaattgccagttttaatattttggcatattctattgctgcctcttcctattcactacttttttttttttttgagatggggtcttactctgtcgtccaggctggagtgcagtggcgcgatctcggctcactgcaagctccacctcccgggttcacgccattctcctgcctcagcctcccagggtagctgggactacaggcgcccgctaccatgcccagctaattttttgtatttttagtagagatggggtttcactgtgttagccagaatggtcttgatctcttgacctcgtgatctgcctgccttggcctcccaaagtgctgggattacaggcgtgagccactgtgcccagcccctattcactactttaaaaaaaaaaccatattaacagttgaactccaacatgccagttccaccatcttgtgctctggtgaagcattttttaaaggaatagaaaatgccattactttgtgctaaggggtaggagtatagattcttcagaaggaatgtagaaagcaggatgctaacagacccaatccatgtttgcaatttacttgatggagatcagagaagtaggctaatggtggggaagcatttccctgctgatgttcgtgcttcctggttcacaggggctgggaaccgacgaggactctctcattgagatcatctgctccagaaccaaccaggagctgcaggaaattaacagagtctacaaggaaagtgagtagcttgatttctgtgattcatcctctcagcccaatttatgtgactctatcatggccactggggttagggttcgggctaagatgcctgcattagtgatgtgcagaagtgcctgccaccttgactatgcaggcaaggttggctgtggtccaagtttctctccttcacctcctcattgcctgcattttgattattacattccactagaacttctgtgttagaagaagggtagacaggagggaaaggagagaaaacaaaacttgtttttaaacaagatcggatgaggagaagtagcaagtattatatatggattccacttattgggcgctgttcagtgtctgctcaagaggttgccaactctggactgtggataattgaagaattacagcaagagacccctgtggactggtgcacacttagcagtatagaaggctatgaggggaataaacaatgcaacttacatcgctactgcatttcttttttgttttactttttaaagttattatcatagttttacatattttgggggtacatgtgatattttggtacatgtattatatataatatgtaattatcaagtcagggtaattgagatatccatcacctcacacatttatctttttttttgtatcaggaacattacagttcttctctagctactgtatttcaatatagatgctattttgaatattgaaatatactttcattcaaaagcattgtttaattcttagtagtttttgccgctgtgcattttctcagtggacagtaaagcacaattgtgtgtgtgtgtgtgcgtgtgtagacctccaatttttttgatgttcagaacaagtactcacagtcaggagggctgggagccagtatttaaactacacgagaggtcaccaatcaacggtgagcctgaggatccctgatttgatctagccctgctgccccctgttatggataataactctggctctgatttcatgagggcgaaaatcattctagtgaatccttcctctgtttggggttaaggagaatggatatgtccagctgacgtagctgttctgcttctcagagtcttagtgggaaatggggagattggggtggatggttggctacacaggcagaaagcataaaaccaggtgtattttcctccaagtgtacaagactgatctggagaaggacattatttcggacacatctggtgacttccgcaagctgatggttgccctggcaaaggttggtttcccagtttctttctttgcccttgcttcctcccaaggcaagtcacatacctcattttatacttggagtgaattaactaaatcccctgtgcctgcatcagaaattcagctgcatttttgaaagtgggtttgcactgtcactgcagagttgtcaattttgtataataggatttcttatcctgcaaaacctcatggacaagtggactttgggagccagagaagggatgggcggctctcaagtcctggcctggatttatgtgccagagccttggccgtgtgacttagggaaggtcactttgcctctatctgttgtcatgcaggacccagtgggaagtgaccttctggtttctttttcactgcgtttacttctcatggaagaatttgcccatatagtcctttgtctggggtggagttgtctttgtggagctgattgctaatattaacacattaacatggaggaaggggcatttcccctgtgaatccctagttctggccagcgtgtagcttaatacttatgtgccaggggagggacgagagaccctgggaaccctgatgacaaatgacagatagtgcgtccggcccactcacatctccattactgcaacaactcctatgccattctccctcgctctcctctcttcgctaccacctgccccatgtaccaccatccacggatctctgtgaaatacactttcaccattttactcctctgttcaaaccccatttctgctgcatcaaatttaaactcctaactgctgtgaaaggtcctctaaaccctccctgcatcttctttgctcatctttcccgctcagctctgctctgacagggcagctccttacttacctgagagcgtgctgtgccatccctcgtgtgccagctggctctcccgctctgcttggctagctgcatctgactgacccttgaagtttcagcttaagcccaggcccatcgttcacactctttgctgactctgccctctgagagttcttcctccgcccgcattttgtgtctttctagtgctgtgggttcccgggctgctttacatttgtttccacatattcctccatctgcattgcaagctctctgtgagaaagagctaaatctcatcagctttttgtgggggatggggacagggattctgtaaggtgtgtaggccaggactgggtaccaagggggggattgttgatggcaaggcacagcccccacttccttgctcaatgattttaccactccttggctggtctaggtttctttttctttttcttttctttctttctttttttttttttttttttgagacagagtctcactctgtcaccagggttggagtgcagtggcgtgatctcagatcacagcaacctggttcaagcgattctcctgcctcagcctcccgagtagctgggactacaggcatgtgccaccacgcctggctaatttagtagagacagggtttcaccttgttagccaggttggtctccatctcctgacctcgtgatctgcccgcattggcttcccaaagtcctaggattacaggcgtgagccaccgtgcccggccccatctatgtttcaaagtaagaaaaatcttacgtggttacttatttaggaaattaaataatggcgtacatggactggggagaaaacattttcagttttaaaatacacaaagaaatgtatttgaagttctttttctttcccccatagggtagaagagcagaggatggctctgtcattgattatgaactgattgaccaagatgctcgggtaagtgctgagctttttgctttgagtttttgttttctggtaagtctctggatagtctatatagtaatttaactctgtgtgacaaatgactcccaaactctgtggcttaaaacaacaaacatgtattatttctcagtttctgtgtgtcaggaattgaggagtagattagcccaattgttctggctcagggtcttttctgaggttgcagacaaaatgttgcatggctgcagtcacctgagggcttgactgggtcaagggaatctgcttccaagatggtgcacttcacatgactgttggtaggagaccttagaatcgctccacatatgcctctccatggggttgtttgagcgtcctcacaacatggcagctggctttccccagagcaagcaatctgcaaagaggaagccacagtgtcttttatgacctaacctcaggagtcccaccttgcactgctgtcatactcttttcattaaaagtgagtcactgagtctagcccacactcagtgggaggggattaggctcttcctttggaagggaggaacctcaaagaatttctggccatattttaaacccaccatagtctgacagcaatgtttattagaagacattctcttataatgctggtgttacttacagaatcaatacgtgactcacatatgctcactcaggctttgcttgtatggaagcatcagtttctgcagagtgtaatgtggctgtgcataccaatcaggcaggcaggtgggaagcagaagaaggtggaggagacacagccagggacaggatggtgtactgctctgttgtggtgggggagaaagggaggccagcagagacctgtccttttctggctgaataagacttttgccagttctagttctattatctctgagaactatttgttaagcttattcagactgcaatgaactatattctttactcagagggacaacgattatctcaaagtaagtcataaaagctgcagaaaaaaattaatttaaattaatgttagttttaaaattcaatatattccacacggcacttctagcaggtagtagagaagggttttaaataaagtaatagaagttgggttttgcagttcctagatggtggaagatcacggaatgaatatctacccttgcataagcctttcttcctcttgccctccctgccattgttagggctacttgtagcccctaaattttccagaaactgaaagtgagatgagatgggctccttttccagctccatcactccctgagtctctgagaagcttgagaatgagagcctggtctgtagctgtccagtaaacatctgctagcttatctgcccctaaatgtgcccaaagggaggagggccagatgtgttaatgaacatttacttgttcttctttatatgaatacaagctcttggtccctcctttcttattcaaggaaggagattgtacagcagacctcacgaactatctgcagtctcatatggtatccatctgtgcctaaggaagactgcttgtgattaagacttttgacctaaatagtaggtctctgcccatgtctgcagtataatcatctttcctcgtttggcattttgaatgtgtagctttttttgttttttttgcatgacattttttttgacgttacattggatgtgtagttaacttttcctggttggttgtactcgtaggatctctatgacgctggagtgaagaggaaaggaactgatgttcccaagtggatcagcatcatgaccgagcggagcgtgccccacctccagaaaggtgggcactgtgctgagggagtctcagtgccttggggccctggctggggcggctgggtggatgtccatgttgggatggagtctgccagaatgaggttctgtctccgcttggcactctcttaggctcacccattttccctcacctttctctcccattctggattcttttctcttgcaaatagtttctgcatttggtgctttattctgcagctccttcttgtttgatgatcattttgtcttgccattatttgttgaagtagtggactttggtgcatgctctgtactgtttcctatggttttcggatggaatgggttccactcaggggagatagagatggtccaaatatgtggcctgggcagtgccattcaggacaggtggtatggctgttccacgacaaacttggccaatgttggctctggtcaccatggtaacctctaagctcctaggatgctgtgatcatcctcaatttttaaaaaaattatggtgcataaaactaggtgggtgatcattgacagctttgactagtggctcggatctgataactctttgttgtttttcctcagtatttgataggtacaagagttacagcccttatgacatgttggaaagcatcaggaaagaggttaaaggagacctggaaaatgctttcctgaacctgggtaagtgaatgtggcccccattcctggtagacatcagctaccagagcagaagtgacagatggccatcctcttaatccaaatgtgtttgggaggtgtggcttctatgcatgctttggatagttttacagtcttaattgtatagatttcagaatataaaactgaagaaaggcctaacttggtaacagattgttgccagggaggagtaagagaacaggaggagagaggggtgtgttgtggaaactcacgtatgcacttgggttctgcaggcctcagagacccctggtttaaaaccgtggtggaacttagtattgcagaggatttctacatttcccttagcctgtcctattttgcagcccttttccattgcattaggtcacttctggtttgtggcccagggccagggcatcctctctcattggtagaggagagaccagagcagctgcagcgctgactccctttcttctctccacagttcagtgcattcagaacaagcccctgtattttgctgatcggctgtatgactccatgaaggtaagggcagctggctgagagagctgtgtttccacactcagcttttcttcttttgggtcccaaattgagtctccttgattcatggatgggggaaggggaccccactgtgtggatgcaggaacacactagtcagctgtggttgtatgtgacagctgagagaaccacaaatctgtcttctttctctcagctgcttgaacatgtatttgcgtacagacaaaaagtaaagtgccatgggagagagaaaatgcgacatggtagtcgtgtctgatccctgctcaggtttctccgtgatttcttcctgttactgccagagtcaagacaagtgaggaagggagcgattattaagcacccactatacagtggacaagtgctactattttaccttaaatcattgcataacaacctctgaggcttatatgattatcttctttataaatgcagagatggagctcagaatacctcagcctgcttgaagttacacagacagatttgaacctgggtctatcagaccccaaagacagccccacaacccttccctaaacgaaccacctcttcccgtagacccatcccattttctacacctcaagtgtgccatgtgttttctggcttctaggcttttgcattttccttctggaacatctcccttgtctgtgctgcctctgccatctgtctttgagttccatatcaaatagcaccccttggtgccttcgctctgatgctctggaagtaaactcagtggtctttattgcacatatcattagaaatggcacagagcgatgatagaaatgtgttggcatgttccctctaagcctgcaagagtcaggaacctcttgttacatatggagactcagactgcttgaactgagccttgcagtagtaggtgctcagtatatatttattgaatggtggcatagagtgggagtctgtgctgactacagcctggtgtgtttggaattcccagatgctcatctatcttttattttctagtcttgacttaaattatctatctaaataaatcactccctccctgccatacactgcctacatgcctacacctccctacatgccatactctacctacatgccttaccctccctccctgacatcacatccctccctgccttcctctccctccctgccttcccctgcctacctgccttcccctccctccatgcctacccctccctccctgccttcccctccctacatgcctacccctccctccctggcttcccctccctccctgccttcccctccctccctgccttcccctccctccctgccttcccctgcctccctgccttcccctccctccctgccttcccctccctccctgccttcccctccctccctgccttcccctgcctccctgccttcccctccctccctgccttcccctgcctccctgccttcccctgcctccctgccttcccctgcctccctgccttcccctgcctccctgccttctcctgcctccttgccttcccctgcctccctgccttcacctccctccctttccttcccctccctccctttccttcctttccctttccctttcttctctctttctctctccttccttccttccctttttctttctttctctctttctttctctctctctctctgtctttccctctctctctctgtctttcctttcttataggtttttgggaaacaagtagtgttcggttacatgaataagttctttcgtggtgatttttgagattttggtgtacttatcacccaggcagtgtacactgtgccctaatatcccttatccaaaatgcttgggaccaggaatgttttatatctcagatttatttttgattttgtaatatttgcatatatatgatgaaatattttagggatgggacccaagtctaaacttgagattcatttatgttttatatagaccttacacacatagcctaaaggtaattttatacaacgcttttgataattttgtgcatgaaacagtttgtgttaagtgctgtatgtggaatttttcattgtggcatcatgtcggcactgaaaaagttttggattttggagcattttagatttcagattttcagatcagggatgctcaacctgtagacgctttctttaacgataacattctcagcgaatgtaacaaatatcaacttgattttcagggcaaggggacgcgagataaggtcctgatcagaatcatggtctcccgcagtgaagtggacatgttgaaaattaggtctgaattcaagagaaagtacggcaagtccctgtactattatatccaggtaagcccgaggtgcagtgtcagcctgccctgccgtccagagcaccccgggccctggcaggtggcctggcagaatgatgacagagtggcgattttctgttttctgactctctggggaagagatgctagtcatcaactatcagggatttattttgaaagcaccatttgtgatttgtcctggactttgtacaatcaggcagatgttttatatttttcacatctgttactctacaatgatcatcggtgttcatgacgatgatcctgcaaggcttgctgacatcccgaagaggcttggaagatcagttacattttactttttttttttttttttgagacggagtcttgctctctcgcccaggctggagtgcagtggccacaatctcggctcactgcaacctccgacttctgggttcacaccattctcctgcctcagcctcccaagtagctaggactacaggcgcccaccaccacacccggctaatttttttgtatttttagtagagacagggtttcaccgtgttagccaggatggtctcgatctcctgacctcgtgatccgcccgcctcggcctcccaaagtgctgggatgacaggcgtgagccactgcgcccggccacattttacttttattatgcattggttccttgaaaaatcctctgggataggcctaacaactttcagttattcagaactcccatctctccaatcagtttagcatctgtctgttttgatgtgatgtcgcatttgcagtaaggaagtgatggcattcacagtggtaccactgtgtagatttcagacagcccttgcaattcccctttctagaagttcctcagatgtccaaaggcatgcccatggttagcaaggataaagttagagctggattttttgtagccaggtttattagggcacatgtttaaagtcaaaggaccagttagactcttagtaattgttcctcacctcaccagcttatttccacttgaccttaataatgcaggaaataggagagtgagctaggaaagtaccctgttttctgtggaaagacgaggacaagagaggaaagttagggtgtttgtaggaccttgctgcagtaagaacagccctggtcactaacctatgtcaatcctcagcaccttgcactccctccaccccacagtcctaaggagccttgagtgtcttccccagcacctcctccgaccacactcctggaggcttccctggcaatggtttgggtgtggccttccaggcctttgtatcagggcaggtctcctgcagagtcttctctttgtcatgggagaagcttcattgtgcgttgaggctacttctgtgttattgaggagtctgggcttttttctgataccacgtttcttttctttcctgggccattgtagcaagacactaagggcgactaccagaaagcgctgctgtacctgtgtggtggagatgactgaagcccgacacggcctgagcgtccagaaatggtgctcaccatgcttccagctaacaggtctagaaaaccagcttgcgaataacagtccccgtggccatccctgtgagggtgacgttagcattacccccaacctcattttagttgcctaagcattgcctggccttcctgtctagtctctcctgtaagccaaagaaatgaacattccaaggagttggaagtgaagtctatgatgtgaaacactttgcctcctgtgtactgtgtcataaacagatgaataaactgaatttgtactttagaaacacgtactttgtggccctgctttcaactgaattgtttgaaaattaaacgtgcttggggttcagctggtgaggctgtccctgtaggaagaaagctctgggactgagctgtacagtatggttgcccctatccaagtgtcgctatttaagttaaatttaaatgaaataaaataaaataaaatcagttcctgagtcacacaatccacatttcgaatgctcagctttcacatgtggtcagcagctagtatatctggacagcgcaggcagggaacatttcgatagaaagttctgttgggcagcagtacatgcccagggcatgagaggacctatgggggagaaaaagggtcccagagggaccccttatctgcttatctttctacaggttaattaggtgaaaataagcatcaggggcagccacaaactggagagagcagtggggcagggtggggcaggctacagcattctggcaaaggagatccaacacaagccgatgggaagcacggagaagggatttcttttgactgggaggattgagaaagatgatagagaaaaggaacaatttgagctgcacactaaaatctaaggtgaggttttacagctgggagaaagcactccatgcaggttcttaagggtctgggaatgaatgacaggtcgctgatacaatggtacacatgtcaaaaagttcagagacttctttctgtacagggaaagttatgtctctcccttactagccagtggccttccctggagtcgcctggtttccagtacattttcatggatagactgcatacgcatgtatatatatgtatctatctgtgttcataaatgtgaaggtgctgtccccaggctgctggtactgggttctgcagattcctttttatacaagtgctccccctaagcagggtagagggctgggagtgaggggaagttgactactcctcctaacccttctccttagtggagggtgtgtcaactactcatttttggcacctggctgatgcagggcccactcagtcatctgcagggactaggtaggtaatggaaatgaatgtatgaaatgggcaggttggacagaagtggggaatctggggaaaatggggaatgcctgccttgcttgaggcattcaaattcaattcaaacaacagtcgtaacaacatggcattgaccaaaccaaatacatccgtgagctgattggctgctattttggccctttggcaaactttagatggaaatttggatcgagcatggctcttgggtcactagtggcccataacgtacgtgaaaggcccctgagatagtccttaaaaagcaggttatgcaaaaatcaggtattttatcaaatgtgtcctgcctatacatattaaaatggatgccccaaatcacagaatatactgttctgtgtgcttgggcagagttcaaggaactgcctaagaagcaggacctttctcattaaccccaaattatactgaactcagaattgatagggctgggcagagactgtcaggagcagtgtttcagatcagtgaacatttaggcattgttacctctcaatcatacgtgtgtttcaggctgcaaagggagcagtggtgtggagcagacaaggccatggggtgaatatggggaaacttacgctcccactgtgcccaggacagtctggccactggtgtggccaacaggtatgtgggaaagttgaaagggcaggccaacataggaaaggcgcttggagaactgtttcaaacactgtctactgtttttcctctatacaaagcaatggcagtccagtgttttccaaaactcacagccagggcacttgaattttggtcccattttcttctggatttcagcctgtcctcttcagtcaagctgtccaaactgtttcatgaataaagagaaccatctggaggtttgacttattctccccagaaattttactttgcaaagagaaggaaaagggtacctggcaggctgtgagttggtaacaagaactttgattttattctttgaggaataaaaggtaattgatgcaatgtagctatgaaaacttattgtactgtaacactgtgatcaagaacatgatttttttctccctgccttggtggggctgggcagagccatcatgttgcacaaccccagagaacactcatcctgttgtagtctatgtgaatgatacctcccttggtgttgtgcagtgcacaacctgtgcagccatacatgacagccctgtattgtgacctaggtgtgtgtgagatggtcttttccgccttttgctacagagttgcccttccagttaaaaaagttagaaggcaaatcttattgagaaacaaatgggtgaaccccgaaaggtcttgacttctccatggacttgatcttcagaccagttttactgggctatgcacaaatggctgtatatatgaatcttccccagtatgtgaagttcccatggtataaactattagtaaatatagctacagcagggaaaaccaggctcacaaaatggctacatttagcaagacaaatgatttgaggacagaaatcttttaaatcaatttttagtttttaaatgactcccgtctccagtcctctccctgtgttttgacaaacggctttggcttcttatccacatcggtttatttgacctcctttttccatcaactaccaaaatgaaaactctgctgcaagagcgaggagagagagtgcgagcaattttaaacatcccttagcagtgaggcagaacatgctacagccatcaagttctagttgttcattctatttattgagaaaagcttgtagcccgatttcttttacgcgagtacatttgagcaagcaaagtttatagagatgacttacctcattacattagaagagtgatttgctatctcagcatctataagcaattttaacagacatttctggatgaagaaaagcttttgtaaatatatgcgaaagacacaatttcatcaagcattaaattggaggtgccctggaaaaatattacatttgtgcactcaattagcttgattgtggctgaattttgtccactgaaggcagcatttctgcagaaaaacagaagcattccctatgtcagcaggtttcctgaaacaaaaacactttcccctgaaacaaaaacactttgccagtcctcttttgcatttgtgctgttcccagctctgtgtccctaatcaggcctctcggtcttgttcctcgcagtagaatgttagaggagagggaaccagatagaaatccctgacagaaatccaaactcaacaattccagctttaaatagcctgcattcggtgcaaaagctaggcaagctctgggcaaaattgggagggagtcaaaggtagacttaagtcttcctggtctccttacagggtctgtaggacagctgtgcctcctgctgctcccaggactctggtggcctccttactgctctgggaagggcatctcccagctactccttggtatggctgttagcccatgtccttttccctgggatgagtctgcaggacccaccctatcttctatcttggaatggaagttttgtcctcctagtacaggcatgagaagagttaggaaatgaatggttggggtacaagaggactttcttgtgcccctaaaatcagtgaaggaaatgagctaaatatttagggatgatcgtggccctcctccaacacacccctgacccccttgctgacctgtagttgaaccaccaggtctctactaataagaaacaaaccagaaaaaacatgtaatgccactggaacctggctgtgagggtggctgatgtttttaaacagttggtgaggacaaattggaactttctcagctgtaatccattacagcctgatacagcttggctctgtgtcctcagccagatctcatctccaattgtaatcgccacgtgtggagggaaggaggtgattggatcacaggggtgggtttcccccatgctcttcctgtgactgagttctcatgagatctgatggttttacaactgtctggcatttcccctgcttgcacgtctctctcctactgccatgtgaagagggtccatgcttccccttcaccttctgccgtgattgtagcttcctgaggcctacccagccatgtagaacagtgagtcaattaaatctcttttctttataaattacccagtctcgggtagtatctttatagcaatgtgagaatgaactaatgtatagcccaaggcaattatgctttcaagtaaatgtctaaagattaattaatccaagaaataacaaggagtttggattaggaacagagaaatgtttgaaacaagcctttgttactccgagatcgccagatttcaaattttaccatggagtcttgggttttggagaaccatcttggtctcaatgaattgcctttgtctgaatagacatgagctgatatatgactatgaagatttgttaaagtctatagttctgcaggtaatattggtcctcagtcatccatgtattcattcattgacttcatttattcaatagacacacctcctatgtgctggtccctgaacaaagcactagggatatggagataagagagagtaagagcaaggcaaagccagccaagcagaatgacaagggctgtgattgggaaaagcacaggcacttgggggttgagagtagctgattgcatccaagagaaccacctggaaagtttctaggggcggcaatccttttttgttttgttcttttttttttttttttttttgacaaatccttgctttgtcacccaggctggagtgcagtggtgtggacatggctcactgcagccttgacctcctaggctcaagctgtccctgcctcagtcccctgagttgctgggactacaggtgcataccaccacacctagataatttttgtatttcttcgtggagatggagttttgccatgttgcccagactggtgtcgaactccagagttcaagtgatccacccacctcggcctcccaaagtgctgggattacaggcatgaggaggcaatccataaagctggattttttggttgttgtttttttggtatggttttcttaaaagaggattatataatcattgcagaaagttggaaaacacagaaaagtgtgaagaagaaaacggaaatcacctgaaaccccagttggaacggattgctattaatataattggcaagatgacccatttgggaatcagctcttgtttccttgacagaaagctcatcagaaagaacaagaggcagtttttcctcccccttctcaaagaggagttggtgtttaggcagccacagtcaggccttcctcgccccatgggagagttaaggtggcttttggtttttcaatgtctagttcaatccaggatatatacctggattatctcaaaggagtgggctgtggggtgaaagagagaagcaaacagcctttccctgggagagctgggtttccagagatggaaagaggaagttcccaggtgatgggaaatggtgcccagcccccatatatcacctggagtgtctgaccgctgattgggaagtcgagtgtttgcaggagatcaaaaactgaccacagcagtattgggtacccctggaaaagtcttcttgactgggcctgggaatggggaatgaggtcctgctcaatgtcaaagcctattttccaatctcagtctgatttgacaccatttcttcttgcattaccagaacagcccacatcccacgatgggaagctggaagggaatctttttatgggtaccccctgactttgttttctttttgactttttatacctacaatatgtttcccagacaaatcatagtaagtatttcagacacctcagggccccataatttagagctaactttgtgctttgaagagcctaagttaatgcaattttatgtatcagtagggaacacaggttcccatcagagtcataaaacgaggaaaggaaaatgaagtttgcacccagatattgtattttgaactgctgtgaaaacaaagaaatcacagaaaatgatttcagagcatagatgaagcaaagaaagaggtagtagaatcaaaacttttcagctctttagtgacataattgccagttctgtttttcttcttccttagagacacagtcttgctgtattgcccaggagggagtgcagtggctattcacaggcatgatcacagtgcactgcagcctcaaactcctggtcccaaatgatcctccccactcagcctcctgagtcgctgggactacaggtgtgcactagcgtgggagggggggcagccatttctgttgtaatatgaggtttccatgtaattgacacctggcttctcatagtgacagacacagagtaaggtaaggtatgttagccttcttcctagcctgtgtgttgtttatttcttcctttggccaaggcctccagaactccacatagaaattcagtcctggccctccctcatttcatcccggcctgggcatggaatgttgactcagctgcgcctcctgctgctcccgagactctgttggcctccttacccctcggggaaggggtgagctgtgcctggggctcatgctttttccccctctcataaccccggtcatgttggggctgagactgctatgccccgggagctgacctcatctcccagctacttggaagccctgttcttgcatcacccttctccccatgccccagaacccctcctgtcattccctgtcctgctctgctcagttccctcttggaggagtgtttgcacaatagggacagcaatttcttaaagggtgggccctgccctggtgcttggagtatcccatcactttatccaaggacctctgctgtctttccatcattgctggtgactctttgctcctacttagaacatttgctgcaaccccttgcctgcctcaccttattataaataatctgcctgccactgatgaattcagagatgatgacacaagttgtttgtttggcacaaagaatgtgctacgcaagtccaaagaccagataacaaccttgtcctctcttcccccatccatcggtctctctgccggaaactccccccttgacattggtcttggcattaagatttgtcctcaggaaaaaaaaaaataattggaaggggtgatccatcaatcctttagcatacttgattttatattcatttatcatttcttcaacagagaatatggctcttaaagaagggaacgtggggcggggactattgaacagggtatgagaaagtgtgtagcataaccggaggctgaatgtaagtaagcatttaactggaagagccagataaggtgggtcattaatgtacttttgacgtattttataatgtaattctgggtttgatactagaagttttgagggactctccctcagagatacataaatcaatcaattcctatctccaccaaataaagtctatagggttaaaggtgctcagtggttagcctgctgggtcgaaggtgtctgggaccacctgtggggccataggacagtcaggatgattgtctctgggttggattcacctgcaacaaaggctgttacccttgaaccccagtggaagcctgggagttctcttaagctgaatcttttccccagggtctccccacttagtgttccttatggctttgctcccctgggaataatagtgtctaccctgtagggttgttgtgaggattaaatgaggcaatacgtgtaatgtcactggtatagttcttagtataaaggaagcatttactaaaacaaataaatacatgtaatatattaccacatctataatatatgtcatattgtagtgtacgattagagactgggccccatggacctaggaaagactcttcctgctatgcgctgcttggccttggcagaatccagcaggacactggacaatcattccagggatgccttgtggcttatctccttctcgggcctgtttccatttggggattcgacctccttggttctcttgtctaatagcctcggatgtgcctcctgccgcctttctctctgtcagtgaaccacaagacctgactctgtgagccctccgggaagcgtacagagtgtttcgaccttaggtgatgtgaggggaggtgttaatgagttgcctatacagcaacatcatatattttcttggcagtgaggcaggtttttttgtttccatcaattttggaccttatcaagttgatgactatatgtagtctgatgatgggtgagaaataatattcatgatgtccggtgcctcttgttcctgaaaatcaattaatttggttacctaacacagggcagttccttgagggagaggataaaagttcacttcctggagccatgtaactatgactctgattaaacaaccgtaacaaaaactgtaggaaacattgagccagctacattcaggggatttttggccccacaatattagaagatactaggaaggtcaggaagcctgggctgtatagtttctcttccacgtggacatattcacccaacaggtccaggcagttcttctcacacttgtttctgtgactaagtccctgccaatcacttctggggacatcacagaataatgatccattttatatttattatataaaccagcagttttgctagtgggaaattttaatcatatgtgtgcaggtattatgactcaattttatgcataaaatattttcgggatgtgacatgtacagtgatgggtttttctccctccttgtatctctgctttcctcttttcctggaatctggcctcaaggcacagatgggcacacataccctcttagcctaacaacaagtaagaagaaggcttgctagtggacattaatcttctcaggggatagagtttgattgtctttgagtccacttcattttctcctcctcagaacctgaatctggagcagagatgaaacagggaatgcccgatccatctatatcagaagagagagctatagaggggattcaggaagaggaggcgtgaaggaatcataggaaaggcagagtgaggccaggcgcagtggctcctgcctgtaatcccagcactttgggaggccgaggcaggtggatcatgaggtcaggagtttgagaccagtctggccaacatagtgaaaccctgtctctactaaaagaatacaaaaattagctgggtgtggtggtgcgtgcctgtaatcccagctactcgggaggctgaggcaagaggattgttcgaacctaggaagcagaggttgcagtgagccaagatggcaccattgcacttcagcctgggtgacagagcaagactccgtctcaaaaaaaaaaaaaaaaaagaaagccagagcgaaaaaggtacaagaggctgggcgcagtggctcacgcctgtaatcccagcactttgggaggcctaggccggtggatcacttgaggtcaaaagttcaagaccaggctggccaacatggtgaaacacgtctctactaaaaatacaaaaatcagctgggcatggtggcgggtgcctgtaattccagctacttaggaggctgaggcatgagaatcccttgaatctgggaggtggaggttgcggtgagccgagatcacgccactgcactccagcctgggtgacagagagaggctctgtctcaaagaaaaaaaaaaaaaaggcacaagggcaaggatggagagaaaggaagagaagtgccttctccaagggctggcctcaggacaaagttagagccaggctctaaagaccccaattgtatggacagcccaggagtcagattgagcagattgagaagaaactctcaaatctcttccactagaaggattttctgttcattgaaagatactgtttggacttggagtaaataatggtttgaatatttttctgcagctgatgttggagcttgatgggttaagataagaattttttattctctcatccatgatgaagaactcagtgtaggaattttgtacattctgagttttctatttaaattgatttactacccagacatttgttttgttgtccaatccacatgagctagctaataaaagcaacgttctgaggttacatgttctgaggtgccaggcactgatgcttgatatagttcatggtattgaattcccatttgactggtgtgaggcctgaggttcagtgactttcccagagtcacatggctagtaagaggcgggatccaaacctacttccacatctctgcgagagtggatgcaccaggattttaataaaaatggaagaaaatttacccattagctttgtatgcacaaattggaaaatgttagagacggggtcttgctctgttacctaggctggagtgcagcaacgcaatcacagctcattgcaacctcaaacccctgggctcgaacgatcctcctgcctcagcctcctagagccttggcattacaggtatgaaccaccatgcccggcatcattttttaaactaaactttgaattttagaaaagtttcagattcacaaaattattgtgaagataatacagaatacctatattccctataccgagttttccctgttaacatggtatattagtataatacatttgtcacaatttttaccctagcactgatgcgctattattaactgaagcccgtagtttattctaatgtccttggtttttccctcgtgtccttctcctgatcgagggtcatatccaggacatcacactacatttagatgtcacgtctctcaggccccttgtgtctgtgacagtttctcaggcttgccttgtttgtaatgacattgacattttgaagactactgatctgttttgtagaatttctctcaattgagaattgtctgacttttatctcatgattagcttggggtaatatgttttttggaagaaaaccacagaggtaaaatgccattttcatcctcttatatcaaggggcatcctattgacatgatttgtcattagcgaagttaatgttggtcatctggctgaggcagtgtttgtcatgtgtctccactgcaggggaaccctgtccctcttccatgctgtaccttttggaaggaagccactgtacggcccacacttaaggagaagggagttatgatccacctctttggaggtgaagtagctacacaaattattggaattctgagcaagagatttctctctttcttatttatttattcagttattatgtcactatggactttggatattttggatatttattttatactttgggttataatccaatactactttttttgctgctcaaattgttccagctttggccattgggagttctttaagctggttcctgtgtctctttgacacatcaatttaggggtgtgtgtgtgtgtgtgtgtgtgtgtgtgtgtgagagagagagagagagagagagagagagagaaagagaatgagaacttccttactttcccaacactgcaagatgccccaggcttagagagagagagagagacagacagagagagagagaatgagaacttctgtactttcctgatactgcaagatgccccaggcttatcttgtatatttctttctttctttccttttttttttttttttttaagttctagggtacatgtgcacaacgtgcaggtttgctacataggtatacatgtgccatgttggtttgctgcagccattaactcgtcatttacattaggtatttctcgtaatgctatccctccccctgcccctgaccccatgacaggctccagggtgtgatgttccccgccctctgtccaagtgttctcattgttcaattcccacctataagtgagaacatgcactgtttggttttctgccctgtgcatgtttgcagggcaaacatgttcatgtcctttgcagagaaatgggtgcagctggaaaccatcattctgagcaaactatcacagtgcatgttttgggttgattccaagtcttcgctattgtgaacagtgctgcaataaatatatgtgtgcatgtgtctttatagtagcatgatttattatcttttggatatatacccagtaatgggatcactgggtcaaatggtatttctagttctggatccttgaagaatcgccacactgtcttccacaatggtggaactagtttacactcccaccaacagtgtaaaagcatttctatttctccacatcctctccagcgtctgttgttttctgactttttaatgatcaccattctaactggcgtgagatggtatctcattgtggttttgatttgcatttctctgatgaccagtgatgatgagcattttttcatgtgtctgttggctgcataaatggcttcttttgagaagcgtctgttcatatcctttgcccactttttaatggggttgtttgtttttttcttgtaaatttgtttacgttctctgtagcttctggatattagccctttgtcagatgggtagattgcaaaaatcttctcccattctgtgggttgcctgttcactctgatggtagtttcttttgctgtgcagaagctctttactttaattagatcccatttgtcaattttggcttttgttgccattgctttttgtgtttcagtcatgaagtccttgcccatgcttatgtcctgaatggtattgcctaggttttcttctagggcttttatggtgttaggtctaacatttaagtctttaatccatcttgaattgatttttgtataaggtgtaaggaagggatccagtttcagctttctacatatggctagccagttttcccagcaccattgattaaatagggaatcctttccccatttcttatttttatcaggtttgtcaaagatcagatggttgtagatgtgtggtgctatttctgagacctctgttctattccattggtctatatctctgttctggtaccagtaacatgctgttgtggttactgtagccttgtagtatagtttgaagtcaggtagcatgatgcctccggctttgttctttttgtttgggattgtcttggcaatgcaggctcttttttggttccatatgaactttaaagtagttttttccaattctgtgaagaaagtcattggtaccttgatggggatggcattgagtctataaattaccttgggcagtatggccatttttacgatattgattcttcctatccatgagcatggaatgttcttccatttgtttgtgtcctcttttatttcattgagcagcagtttgtagtttttccttgaagaggtccttcacatcccttgtaagttggattcctaggtattttattctctttgaagcaattgtgagtgggagttcactcatgatttggttctctgtttgtctgttattggtgtataggaatgcttgtgacttttgcacattgattttgtatcctgagactttgccgaagttgcttatcagcttcaggagattttgggctgagatgatagggttttctaaatatacaatcatgtcatctgcaaacagggacaatttgacttcctcttttcctaatcaaataccctttatttctttctcttgcctgattaccctggccagaacttccaacactatgttgaataggagtggtgagagagggcatccctttcttgtgccagttttcaaaggaaattcttccagtttttgcccattcagtatgatattgggtgtgggtttatcataaatagctcttattattttgagatacgttccatcagttccttgtttattgagagttttcagcatgaagggctgttgaattttgtcaaaggccttttctgcatctattgagataattgtgcagtttttgtcattggttctgtttatgtgatggattatgtttattgatttgtgtatgttgaaccagccttacattccagggttgaagccaacttaatcgtggtggataagctttttgatgtgctgctggatttggtttgccagtattttattgatgacttttgcatgaatgtttatcagggatattggtctaaaattctctttttttgtctgccaggctttgggatcaggaggatgctggcctcataaaatgatgattggaatagtttccgaaggaatggtaccagctcatctttgtacctctgatagaatttggctgtgaatccatctggtcctggactttttttggttgttaggctattaattattgcctcaatttcagagcctgttgttggtctattcagagattcaacttcttcctggtttagtcttggaagggtgtatgtgtccagaaatttatccatttcttctagattttctagtttatttgcgtagaggtgtttatagtattctctgatggtagtttgtatttctgtgggatccgtggtgatatcccctttatcactttttattgcgtctatttgattcttctctcttttcttctttattaatcttgctagcagtctatcagttttgttgatcttttcaaaaaccagctctcagattcactgatttttttgaagggttttttgtgtgtctgtctccttcagttctgctctgatcttagttatttcttgccttctgctagcttttaaatgtgtttgctcttgcttctccaattcttttaattgtgatgttagggtgacgattttagatctttcctgctttctcttgtgggcatttagtgctataaatttccctctacacactgctttaaatgtgtccccaagattctggtacattgtgtctttgttctcattggtttcaaagaacatctttatttctgccttcatttcattgtgtacccagcagtcattccggagcaggttgttcagtttccatgtagttgagcggttttgagtgagtttcttaatcctgagttctagtttgattgcactgtggtctgagagacagtttgttataatttctgttcttttacatttgctgaggagtgctttacttccaacaatgtggtcagttttagaataagtgcgatgtggtggtgagaataatgtatattttgttgatttggggtggagagttctgtagatgtctattaggtctgcctgttgcagagctgagttcaggtcctggatatccttgttaaccttgtgtctcattgatctgtctaatattgacagtggggtgttaaagtctcctatcattgtgtgtgagtctaagtctctttgtaggtctctaaggacttgctttatgaatctgggtgctcctgtattgggtgcatatatatttaggatagttagcccttcttgttgaattgatccctttaccattatgtagtggccttctttgtctcttttcatctttgttggtttaaagtctgttttatcagagactaggattccaactcctgcttttttgttgttttccatttgtttggtagatcttcctccatccctttattttgagcctatgtgtgtctttgcattgtgagatgggtctcctcaatacagcacacagatgggtcttgactctttgtccaatttaccagtctgtcttttaattggagcatttagcccatttacattgaaggttaatattgttatgcttgaatttgatcctgtcattacgatgttagctggtaattttgcctgttaattgatgcagtttcttcatagtgttgatggtctttatgatttggcatgtttttgcagtggctggtaccagttgttcctttccgtgtttagtgcttccttcaggaactcttgtaaggcaggcctagtggtgacaaaatctctcagcatttgcttgtctgtaaaggattttatttctccttcacttatgaagcttagtttggctggatatgagattctggtttgaaaattcttttatttaagaatgttgaatactggtgagatagagtcttactctgtcactcaagctggagtgcagtggtgagatcttggctcactgccacgtccaccttcctggttcaagtgattctcctgcctcagcctccagagtagctgggattacaggtgtgtgccaccacgcccagctaagttttgtttttttagtagagatggggtttcaccatgttggtgaggctggtctcaaactcctaacctcaagtgatcctcccaccttggtctttcaatgtgttggcgttataggcgtgagccaccacatctggccatctatgtcttttcgtggtttgatatcttttttttttattgctagatgatatttcattgtataaatgcaccacagtttgcttttccattcacctattaaaggacatgttggctgctttcagtttttggtgattttgaataaagctgttataaacattgctgtgcaaatttttgtggggacataagtttcagctcatttggacaaatacctaggagcacaattgctgggtcacatgataaaagattatttcattttgtaagaaactgttaaactgtcttccaaagtggctatgccattttgaattcccactggcaaagaatgggagtttctgttactctacatccttgccagcagttggtattgtcagattttttgggtgtggccactctaatagttgtgtagtatctaatagttgtgtagtagtgtttcttttcttttttcttttttttgttttttgagatggggtcttggtctgtcacccaggctaaagtacagtggtgcgttctcagctcactgcaacctccgcctcctggcttcaagcgattctcctgcctcagcctctggagtagctgggattacaggcacgtacccccacacccaggtaatttttgtattctttgtagagacagggtttcaccctgttggccaggctggtctcgaactcctgacctcaggtgatccacccgtcttggcctcccaaagttttgggattataggcatgagctaccgcgcccagccccagtagtgtttcattattttcatttgcaattttctaatgacaaatgatgtcaaacacctttttgtatacttctgtgccatatatatcttctttattgaggtgtcttttcagatcttttgcaccttctttattctgttacttgtttttcaattgttgagttttaagaattctttcgggttttaaatacgagtcctttgtcagatatgtgttctgcaaatattttcttccagcctgtggcttgtcttttcattctcctaacggtgtctttcacagagcagaagttttaaattttagtaaagtccaacttaccaattttttctttcttggagattgctattggtattgtattttaaaactcatcaccaaacccaaggtcatgtagattttctcctacgttgtattcaagaagttttcatggttttgcagtttatgtttaggccattcattctgaattgacttttttttttttctcttttttgagatagggtttcactctgtcacccaggctggactgcagtggtgcaatcttggctcactgaaacttctatctcctgggttcaagcgattgtcctgtctcagctcctgtctcaatcaagtagctgggattacaggcgtggaccaccacacctggacaattttggtattttttggtagagacagggtgttggccaggctggtctcaaactcctgacctcaagttatccgcctgccttggcctcccaaagtgctggtattacaggcatgagcctctgcacctggcccattctgaattaatttttatgtaaggtataaggtctttctctaggctattctttttgcatatggacatccagttgttccagcctcatttgttgaaaagccaggatcaatttctttattagcaaaatatttcagtctagtttttggaaccagagtatggtggaggcaatcattgggaactctagcccaaatccatgaggttttaagataacttcaacatattattttctttttactcattttcctgcgaaatcagttgctgtctgctgctttctaaagagagttatgaatccattgctatttcaatagcccaggagaggaactgctgtgggagggaggggatatagacagcacagtcccttcaggaggggaatttgtggaggaaggggctgtgattgggaagcctctgctttagccttgatgatagaaaactcttaatatatgagaaaatcttattaacatacttttaagactaaattcaccttttaggaaaaacagaatcttgcaacacacatccacaccccacacactccctttctgccaagtcctggcatttcctaagagcaccatcaacacccctcaccctacccttggggatccaggcagggatcgcctcctgacagggtgggggagggggacgctgatttttataactgcgatgtatgttgcaacattaaacaggataatatatgaaaccatctacatatttcatgattctgttttattctgaaactgtaaaaatcactttttaaaattaagatgaatggaaaataaagaagagcgccatcttgtggggatgtctgcggcaaccatagccatctcagatcttggcggtccatcaatctcccagaacccttacacatttctatgtcatatattagctgaaaaccttagggcagctgatcaaagacctttcttcagttttttcttttacctacgatgaataattctatgggcttttattttcataaatgactaaaagctacttcctaatgatctataaaatcagtcattgagatgtgctaaaattggcatttataataaaaatgcacattattagtttctttccatactctattttgtataagactcttgagtgacaagagtgacagcatctcagtcaatcaagtgatttgagcatagagtagagggagttaaatccaggtacataaacaaggaatgagaattccagaaattttcagagaggatgctttatattatgtgattttcaaatgcggctagtcttatcttaaagaatacggtgatcatttatttatcattatgaggaaagagccaggatggaccaatcagtggcaggacagaagttttaggtgaagtgtaggggcaattgaggcaaattgggaacttcaggctagtgttaggaattggatgccagaaagctctttggcaagatggagccaaggagggtgggccatgttaactacagctgagacactcccttcccatcccaagtttgctgctttctaccaggagaccctgggcaggtccctatccctcattgtgccttcttttctttctttctcttttcttttcttctctctctctccccacatcccctatccctccctcccccctcttccctccccctccctcccgcctgcctgccttccttccttccttccttccttccttccttcctttcattctttccttctttctctcactctgtcagccaggctggagtgcagtggtgtgatcttggctcactgcaacctccacctcctgggtctaagcaactctcctgcctcagcctcctgagtagctgggattgcaggcccctgccaccaaacccagctaatttttgtatttttagtagagtcgggatttcaccatgttggccgggctggtcttgaactcctggcctcaagtgatctgctcaccttgacctcccaaagtgctgggattacaggcataagccactgtgcccagcctctttgttttctttctaatctgtaaaatgagaagtttgaaatctataatgcccagagtcccttcaagacctaaaaatgtgaggtatcaaagagaagctctcatttctcaatctgttttaacccagatttctggtcaaaggcaggaattttcacaaagatccttatctttagtgaggcttctaagtagattattttgaagccatagaaatgatatatattttacagttaacaaattatggaaatacttgaatataataactccctttaatatttccccctcactttgaattccctattggaacaggtatcagagaaaagccatactcacttccatctaagaactgaggcctctgggagccttgctccactggggatataccttctccttgcagatgggtgcactcaacgtcacaggggcagtgatgggtgacatgatccacccagcctgcagccactacatctcatgctattggcctctgacagtggtgctgatgggaaaaaactgtccctcccatggccagttgaaggacacctggggagagatgccacctcatgaggtagactttctctgttcccagatcagtaaggagcattgccttgcatttgtgcataatttttgtgtattttaagagttcttgtatatttaagagctctcatgaattcctgtttgcttgagtgaatgcattttaaggtgtttctggagaataggagaggatacaaaatctaacaagataccaaactttcaatcctgaattgcaacttgtgtcaaaattacgctactgtgggtttgtcaaaaccgccctttaaaaaaaagtgactctaaagttgtattgatgacatttgaccacaagaggacgctccaacaaagcacctcacagctcaaaagtctacgtctccttttcaaacatttacatgctgcaatttctgcctggtcttatgatataaagcttaatgccacaaatattgtttcaaactttatgaaaagagtttttctttttttaaaaaaaagaagattgggagctatagcagtgaatcctgagctcaaggtaaactattttcattagctggaggtgctttataatttctccatcagttttcaaaaaagggacaaggactttaagaaccttttcttcctttaacaatcaaacgaaacaacacaaactcaaaacgctttaagaacatttcaatttccaaactagaccttttatggatcattttcctaagagttctaagtctagaaatgtgattaaagaaaacaaaaacaaacaaacaaacacaaacaaaaaaacattttccagtctagacgcagccatcagcgaaaatgctccattacctgttacctcttctaggatacagatgtttgaaaaagaaagtgggcaagaagctatgtgatggtctctgaagtaaattaaagccctggactgcatttccctagtagtcagataaaacttgagggcataattgccaacaatgaacaccctttccgtttaaccaatctttactgataataaaataattagaataatttatgtgtctgtgctattattaacgtggctttgcttaaaggagattcagctggttgttcacggacgttaagagggtctctcctcccaccttctgagatgacatgtttatacccaggcagcacttctaaatttttaatagagaggaagagattccatttaattaggtagagtgacttgtttatatgcaggttatacatttacgagttctcatgaagaacggaaaatacccattgagcagcctttgaagtttcgcttgtttaaagataattgtaaacccagctcaatggaaacagcatctcagtcaatcaagtgatttgagcatagagtagagggagttaaatccaggttaaataattgcacaaatcacatgtcgatcaatgttcaaaggattttttttctctcaaatcaaagctcttccatcttacatttgattggagtattgaaactgggttatagaaaaaaatgttaaggatgtaacaagatttaaaaatgttaaggatgtaacaagattttttttacttaaaaaattctccaccatttatataaaatcctttctcttttttccttttgatttttacttcatatattctatatagcttattttatttgtgaattaggtaacacaaacatgtcactgtcacaaaagcatttttctacattcataaatcctttctggaaatgagaaatcatttttttcttaaactctgacctaaggtaaaaattccaaatatttgcgtgccttggatggtattgcaaaaaggccacctaaactaatgaggtttcttgaattggtgtacagaaatgaattacaatgcttaagaagttgaagagatttctcgtgatttttaaagtaatattaatgatcgtatggaatgagaaattgagctttgtgttattactataggattagtttttagttcctgaaagctggtctatttataggtatataggatggaattaaactctgaaaaggttaatttttaaaaaatgttctgtagaaggtctatttcctatcaccttttataagtttccctttgaattgtagttgcaatatgcatttggagtgagtccaggaagcttgaataataatgtaatccccgggggagccgctcttaggagagtgggtaggataaatgaaatgctacatacagattcctgacaatatattcatcttgatattatcgcagctgatggattgtagcaaggctgttcctagggcttccctttgccatcttcagtgtctttatcatttcagtgcgaaaaagaaaaaccccatcacacaaaagaaataaaacatcgttaattgaaaagtagcaccttaaaaatatttgtggtaggaaaaatatttgttttgctgcaaggagaacagagagtagggaataaaagactaaagaagagagaaaaagaaaccagtgtcctttgctgagctcgctggccacatgtaaggctctcaaacattttaaccgttgcacatcattttctttttcttctgtgtgcttgtctaatttattttcataagaaaactctgttcctcttgtgcggagccagcataatgtcgctgaaatctcggatgatgtggttttaagatcaaacaagacttaataaggtgggatttgttttcctattgaccttcttattgcttgggtccccctgacaagcttcgaagtgaaggggaggaattagggtagcagctcttcagagaaactcatcttggctggggctccaccttgaaacgggagtgcaagagattgcaaatggctccaaacgagggggcacacacagacttgcaaaatggaagcgggttcttccattgcagaaagaaaggggggcacccagcaggataaacattcaaagtggaagacactgctagtggatttatttttattttaggttctgacagattggccaatgtccttgattggagttggagttcatcagaatgactagttctggcctaatttaagaaacaaaacctcctaactttgtgggggctgctggagagcagggcagggcatcatccatctaagagaaaaacaaaggagtttggtccttttttaaaaatgaaagtttccttaggagtcaaaacggactgaatttaaaggaaattaaagtgagaaaaagagttttgtgaacaaatgaaactctcttccagtaaaaggaaagaaggaggagaaaaatgtttgaaggtggggcgaatgcattgttactaaaagtaaataattccagcccagttttgcaaaaatagagaattgaacccaacagccactcacggtcttatctgataccctaactgaactagagcgcatttacagtttttcttctatcagggtgaataacacatgtttcatgttcttacagaactagcgtggcagcatttgcccaccactggtaaacaagaaaagatgtctatagattccccattattttaggcggccactggagtcagctcaggcattctgagctgcttctgcccatcttttaatattgtccttctgcctaccttttagtgttgcagaaaagcatgcgggagaaacaaacagaagggagtagccaggacaagtcaaattctgtcgaagacactgagactccctgtgccgagagctgacttctgcaagctctttggcaaggtatttacggatgcaatatttctgtcaattctcctcccttatttcactctttgttcccttaatgggcgaattagcctcaggttcttgctaaatctattccttttgggaaaagaaaatgatgtacatcgttataatcatgcactaccaggagaaatgccagttggagcagagtgttctctttcaggggtgttttttcccttgagaagtggctgcttgaatgtcagctgcttggttggcctcacactttgtttcctcattgtggacctgcgtgcagtcctgcgggatgaagggaagaagatattcacaactgtcctagtgaaaagaaattcagatgcacctagttatatttgctcaagggacaacttctttcactgttggagataaggaacttaggccgggcgtggtggcttacgcctgtaatcccagcactttgggaggctgaagcaggtggatcacccgaggtcaggagttcaagaccagcctcaccaacgtggagaaaccccatgtctgctaaaaaatacaaaaattagccaggcgtggtggctggtgcctgtaatcctagctactccggaggctgagacaggagaatttcttgaacccggggggtggaagttgcagtgagccgagatcacgccattgcactccagcctgggcaacagagtgagactccgtctcaggggcggggggtggagtggaaaaagaaggcactcaaagaccggctactccaagcttttcatttcacagatgggtaaacagaggccctttgcagttcagtgaattgctcaagctcctcaaagtgtagtttttggaccagcagcatcggtgttccctggagcttgttagaaatgcagcaactcaatctctaacccagacctaatgaatcaatctgcaatttaacaagatcctcaatgcatggtagagtctgagaagcactgatgccccacacccaaactaggattatggcacagctcaaaactgcctaatttcagcaagtgtcattacttctaaaaaagatgctgccataaacgatatttttagctacagtaggcccattgaaatgtaaaaatactaaatgcgaagaggaaaaagagtgctgctatgcagtgagggtgatgatagggggaaatggtggtatttaacggtacaagctttctggagggcagttttgtaatagttatcaaagtcttaaagatgcacaccctttgatccaacaattccacgtctaggaagttattctggaaaaataactggactaggttgaagagctttgtgaatagaatattgtaatatttatgatagccaaaagattgaaagcagtctaaatatccaacagtagagagtagctaaagaaattctggtatcaatagtagaatgctgggcaatcatttaaaatgataaattggccaggtgcagtgactcacacctgtaatcccagccaggtgcagtgactgacgccaatgctgctggtgtagatgttaaattggtgggcttgctgagtggatggtcagtggagccttctatctgccaccttgctctgccccaagtccttccagcacttttggaagacaaggcagttggatcgcttgagaccaggaattcaggaccagtctgggcagcatagtgagaccctgtttctaaaaaaaaaaaaaagaaaaagaaaaattaaaattagctgggcatggtggctggtgcctgtagtcccacctattctggaggctgagatgggaggattgcttgagtccaggaggttgagactgctgtgagctatgattgtatcactgcactgtagcctgggcaacagggcaacagagagagaccttctccacaccattttccccacacagacaagttatttttttttaatttttatatatttagaggatacaagtgtggatttcttacatgcacatattacacattaataaagtctgggcttttactgtacccatcacccaaatgatgagcgttgtacccaagaggtaattttcaactgtcccccgctcctaccctcccaccttttgtaatctccaatgtctcttattccactctgtatgtccatgtgtgtacgctgttagctcccacttataagcaagaccctggtgtttgactttctgtttctgagttacttcacctaggataatgggtagggacacagacaaaccatatcaactggtaagtgaaaaactcatattatcataccatgcataaaatggtcttatatcttgtttagaaaaagatatatatttaaagttgcagaaggccatgcagctaagtgttaacagtagctatttagaatgtaaataaataatataggtaagaatataggtaatatttttctttttgcttatcttcattttatggttctattacaactgatgtattaattagctaataaagaagataaaatagttattattgatgaatggtatttttttctttaagttctgaatattttactttccagaccaaattcctaaaactaaaaacattttaacattttgtgtataactttgtcattataccatgttatcattatctattaagtgccttcctcccccaagatggtgagcaccttaacaacaaagactctcttatgcacctttatatttagggtttagcctggagcttggcacacagcatgtacttaataaatgttttaaatggatgaatgaaagagttttggatgactgtcttttttccttcgtatgactagcctatggaattaaactcctaggcacacagaaattgattgcaaagttctaattgagctattggtttagctacaatttctagtctagtaataaataaccctatgaggtgtgggtcagggtagaatgaattgagaggtcagggcatagaggcctctaaaggctcagaggaaatgtgcttccctatgagctgaccactacactgacttctccaggtggccctaggggaaagaagtcagcctggctggaacaggtaatggtcagctcatgggaagcacaggggtctgttcttctgcctcagttcatggacagtggaaactggctttccaggtctcagtttgtttgtgtttttgtagttgtaattttggatcttatctcatcaggaggcagggttttgaaaggcttgccctgatgctaactagtactcactgtttcggtttctgctgagaagcactggcatgcattctgtcacctcatcctcactgcttcctaatgaggtggctacccacttcatagagcaggagcctgaaaaaggtaaagctacctgccccaagttcagacacgatgcagtggagctgggatccagatgtagacccgtggaccccgatcctggcccttccaccatgtgctacagaagttgaggggatggtctgagggtttccttccggctccaccctctgtggtgtgactctgccagtcaacacgtccctgggcctttctgaatcttcccagttctcttgtcaaatagggtctattaaaaaatgggtcctccacattctgtgatcacgtattttctttcctgcttttggctctaagtgaagtcaccagaaaacctatcttaaggcttaaaaaacatatgaagggaataaaaaatatttttaacaaagtaacttacaatctagaaatagtcataagattcaagcaagtggattgcaaactaagaggtaaaccctagctttaatttgggatttattcataaagttctgaaaaattcatgaaagtttcattgaatatatgtatctgaccactggcttgtttcttgggataccccagtttctgtatttgaaaatgttaacagtataaaaaatgtaagttttaatctacaaatttgtggaaaacatttctggagttgagtgatacagtaatgtaatgtgaatatttgtttgcatatctttttggctgttttccatttggaatttgcatagtaatatagaaggatcttgaaaagcaatggaggaagaatcatgatttggtccaaattactatctaagagatttctctctttctttctttctccctcccctcccctcccctcccctcctttccttccttccttctttccagacagggccttgctctgtcgcccgggctgtactgcagtgggatgatcatagctcagtgcagcctcaaattcctgggctcaagggatcctcccacttcagcctccctaatatccaagagatttcaaaatcaaaacgatatgaaactactctgagtttttagtgccccctccctgaaatgggttatgttttcattgtaacaatttgtaacttacatttatttgtgtgattatttgattgatgtctgtctttgccacttgcacttgaaattcaggagagtgggagagccatatctgtttagcttgtcattgtatttctaatacatagcacataatagcacatatcataataacagcaatgacaataataatgcacaagggataactaatacttgctgggctttttctatgtgccaggttttgttctagatgctttatgtttaccagctcgtttaattaaccttaatttaatgtaacctcttgacaaatattggttgaatgactttcatataaataaaaaataaatttttagtttatacatctgatacctgtttagtgctgtgaaggtttgggaggctgtttattataataaaagctgaaagacattaaactcaaagtgattccacaaagtgtttcttgtgtgtgcccaataaataaatttttcacttttttacattcttttttatttgtggactcctaaaacagattttaagaaacaagagaaagggctagaggctccctaactacttaaagaaatagagcagcattgccattttaaaatcgggtgttaattttaatcaagaaatctttgattagcagctttcaactctaatggtgggaggttgtctttcaaggaagttttaagctgacatctatgttgctgctgcagtaacctacacttaatttattgtcatttagtgcaaaaattgatgagaacataacctttgtaaggtttttatgttttattgcctgtaaaagataaaatatggggtaaaaggaagtaaaatagtattttgttaagtcaggggatggatttatgttttaactaactgatagaataatcagagggtcataaagatcagagtatctgcctcctatctcttctctttttatgtgagcattcaacaagcttctctttgtggctgtcagacccatgggagctcacccaaacagcaggcccgctttgtccaagggtattaactcaactgtttagagctagaataccaggaggcttctgttgcgcacattaagcgattgggataagtctaaatgaatcagatacttgacatgtgcaaatgggatgtgtgttcacaagggactgtggggttacattgtgtcttgaatggacaggcaaaaacaaagtatgtgagttatgttgaattttgcaggaaacacacaaagagactctggtctttgggaattgccagtgactgtgttgtagaggacgatgccgggaaggcccagccttgctaatttctcctcaacacacccttcatagcattaaaaaaaaaaaaaaaaggaaagaaagataataaatttcaaagtgattagttttgataacgtaggcccgtggttctcaaaccttagcacgcagaggaagccccttggagcaccagttaaaacccagatttctgggcccatttccaggatttctgattcagcaggtcttgggtggggcttgagagtttgtgatatggttttactgtgtccccactgaaatctcaacttgaatcgtatctcccagaattctcatgtgttatgatgggagggaccgagggggaggtaattgaatcatggggccagtcttttctgtgctattgttgtgatagagaataagtctcatcagatgtgatgggtttattaggggtttctgcttttgcttattcctcatttttgcttgccgccgccatataagatgtgcctttcatctcctgccatgattctgaggcctccccagccatgtggaacataagaccaattaaacctctttttgttaccagttttgggtatgtctttatcagcagtgtgaaaatgaactaatacagtttgcatttgttttaagacagggtctcactctgtcatccaggctggagtgtagtggtgcgatcatgtctcactgcgacctagagctcctgagctcaagtgatctctcctgcttcagcctcccaagcagctaagactacaggcgcaagccaccaggcctgactaagttttctgtattttttgtagagatggggtcttactcttgcccaggctggtttcaaactcctggcctcaagtgatccttctgcttggcctcccaaagtgctgggattacaggcgtgagccaccgtgcctggccccgagtttgcagttctaacaagctcccaggtgatgctgtgctgcttgtctagagattgtgctttgaggaccactgctctaggtactcatttacctacatcataggtgggtggacatgccccagggtgttgcaggagtcctagaaaacatcttctcagctcagaagggtggggctgggtgagtctgtaggtattcaggtgtgtttcatgtgcaaacaagccagggcttgtcctaaggataaataactgctttagtctttggagctttcagtctaagattggactgaggaataaaatatgcaagttaatttatttctgtaagtgtcctgtttgctttgtaggatttgctcccaaagtaatctacttgcttggagctcctcaaagatgccaatctgttttattgctgtgttctggatgctaagcacagtgccatgcaccgggccctgctacatgatttgcaggactcagtgcaagatgaaaatgtggggctccttgttcaaacattagtatgaatctgaagatagagacagcagggccctgtgtgaccgcacaggttgtgccccatgaagctggcccttcttgtcacctagtaagcagtttattagctcttttcaccaaaggatcattgaccaaagcttaaccaagaggaattttgaaggacctcctggttaggttccctctttttttggtggaggcaagtgtgatcattttaagtagccttcatagttaacctggcacctctgcatgtgtttgcccatttgcagcatccctggaaggggggcattatgatccccatttgacacacggctcagctgtgacttgaacacatatagtgatttggaccagtgttctgatgtctagtactttaaaaaacttttgatttttagttgccacatttgtgtctcagagaggtttagctacatgcttaaaaacacacagccagaaaacaagtgaacaagaatttgaactcaatcttctagatcctacttgaacattctttctattcccaatcatggaagaaagcaggtttggggaatgatatggtttagctgtgtccccacccaaatctcatcttgaattgtatgcccataattcccatgtgttgtgggagggacctggtgggagaaaattgaatcatgggggtggtttcccccatacagttctcatggtaatgaataagtctcatgagatcagatggttttatcaggggaaacccctgcttggctctcattctcttcgcttgtctgccaccatgtgagacgtgcctttcatcttccaccatgattgtggggcctccccagccacgtggaagtgtaaatccaatacacctctcacttttgtgatgcccagtctctggtatgtctttatcagcagtgtgaaaaatggaccaatgacagggaaggtcattgattctattgactgatatttttgagctccaaagcttagtattgattccagtaaatctagttgatgcttgacctatttctgtccctgtatgctctttagttctgagaacagatggcttctcaaatatgccctgttcccaggagagtctggctcctaaagtttgactactgatggcttggaagttttcctctgagttaatcccccactcccaacattcttcaccattgcgactcagtgtttaggttaggtgaaaatatttatttcctagagcactggaaatatcttctgttccccattgtcttgatttatctggatgcacctggtgttctctcccgttctctgtgggtatgaacatcttgacctctgaggatgtgaaaccaagcaggcatgataattatgcttggtggccagttgacaggctgtctgggtttgagtcctgcttcttcctcttacttgctgatcatggccaagttctggacttaaccacacttgagcttgtttcctggtctgtaaaataggaataatgcagttaacagaggtttactgcaatcattaaaggacatgacttatgcagagttctttggtaacagcattactgtgttctgggctggccccaggcacaactaggtcatgggtgaaatttatctggtttagtgttccatgcttgtttaataccctctcctccccctgccccataaatgctggcatgttcctttttcctgaagtacacctgcactgtagcacattcaagaactcaaacaaacaacaacaaaaaaatagtctttccacaatgggcagaagtgggagatgtttcgatgcaggctttctttgagggagtggggtgcctggtaaaaagaaaattctcttgtagatagatggccatgtgtcctgatagcatggggaaatgaatatgtgtgcaactgtgtgtgtatgcaagtgtgtaaagaagtcatgggccttatcgttagaaccttccttcctccccaacgtcctcaatctttctgcaccccaattcttcagagattttattgaatctatggctggatggggatcggggaaaatcattttactttgatctgctcactagagcttcttaacttctcagtttcttttattagttcccagtatttagagtaaatgcaaacgtttcttcacccaaggtctcaatatccttttttcacaccctgtattagtcccttcccatattgctataaagaaatacctgagactgggtaacttataagaaaagaagtttaattggctcacagttgtgcaggctgtacagaaagcatggtgacatctgcttctgggaggcctcagggagcttttactcaaggtggaaggcaaagcaggagcagatacatctcacatggtgatatggtttggatttatgtgtctgcccaaatttcgtgtcaaactgtaggccccagtgttggagcaggggcctggtgggaggtgattagatcatgggggcggactccccccttgctgttctcatgctggtgagtgagttctcatgagatctggttgtttaaaattgtgtagtacctctcccatctctcttttcctcctgctctggccacgtacgacatgcctctttcctcttcaccttccgccgtgattgtaagtttcctaaggcctccccagccgtgcctcctgtgcagcctgcagaagggtgagccaattaaacctcttttctttataattacctagtctcaggcagttctttatagtaatacaagaatggactaatacacatggcgaaagcaggaacaaaagagagggaggggcgaggtgccacatacatttaaattaccaaatctcatgagaactcactcactattacaaggacagtgctaaaccaattcatggtgttaagccattcatgagaaatccgcccccatgatccaatcacctcctaccaggccccacctcccacactgaggattacattttaatatgtgatttgaacagggacatacaactaaactatattacaccccaaattatttttatatagctaatatgttaaacatcaaaaaatgacaggaagataggcatgtctaattccagctgctttgtctcctgatgctagtgggggaaatgcaggctcaggatccttgagccttaggtaccatgttagcacctgcttgctccctcccttctgaccttgctgtccccatgcagctggtgctgtagccctccccctccctgcccatcttcccaccaaaaaacaacccacagtgcatggaaaccattccgagtccttataatagggatgagatgctttactttttgaaggagggtgaggttgaatgataatagctacgttgcaagtcccaaattgaaatcatccatcaaagattaactgaaggatttactcgctcaaagtgcctatgaattctccatactttcgcatgtattaaagatacctgaggccaggtgcggtggctcaagcctgtaatcccagcactttgggaggccgaggcaggcagatcacgaggtcaggagatcgagaccatcctggctaacacggtgaaaccccatctgtactaaaaaatacaaaaaattagccgggcgtgggggcgggctcctgtagtcccagctactccggaggctgaggcaggagaatggcgtgaacccaggaggcggagcttacagtgagccgagatcgcgccactgcactccagcctgggggacagagcgagactccgtctcaaaaaaaaaaaaaaaaaaaaaaaaaaaaagaaagaaaagaaaagaaaagaaatacctgaaatcaagaccataatttggtcaatgtaatttgacaactcatgagaaaaacaattgcattgttgtacccagtgagagcaccacttctctcctggtaatgaagaggcttgtgctatctcttctgtggtttgctgccccatgctctggttgaccccggtgatcaaggatgacatcaatacctaagaccagaaacaacctaagaactgcattgttgctatgggattctgtctctttccacagtgtacatacagagctaaatcagctggtgttttcccctttaattttccttctctccactctaggtataggccaatgagcatcagaaagctagaaacatctgtacagcttcaatgccaactgagtcattagatatgaacttggactcattatctctctcctacttcttcaggatggaggaaaaaccctctttaccaacatccctgctcctccctctgaatgaagactattgatccaaaccagattcttgaaaatcatcctagacccttttctcctcctcacctccacacccaaccactcactaaatattgttgattgtatctcaagtctctctagactctctcccttcctcgtccccacagtctcggccctggttcaagctaccgcatttcttatgtggattgcagtggtttcctgtcagttctttttgtctctggtctcactctggatcatcagtcctgcccaaaactcctagaacagatcaaacattgctatgatggatcaactttattgcttcccagaatcaagtccaaagtcttcttttaggaaggaatacaatatttttactaatcttcccttgcctacctctagctagaaacaagttagaaaacattattttaatttccccaaatttgatatattcccttaactttctgggcctttgtgcaaaccatttcctcattttctttttactgtgctttgtctggatgactattctcaccttaagggtcacctcctttttggattcttccctgaatgctccctccttttgactttgtaaagcactggcgacactatattgcaccttttttttttttttttttttgagacagagtttcgctcttcttgcccaggctggagtgcaagggggcgatctcggctcaccacaacctctgcctcccgaattcaagtgattcttctgcctcagcgtcccgactagctgggatacagccatgtgccaccacgcccagctaattttgtatttttagtagtgatggggtttctccatgttggtcaggctggtctcgaactcctgacctcaggtgatccacccgccttggcctcccaaagtgctggattagagacttgagccactgtgcccggccttattgaacctattattattattctttaagttctagggtacatgtgcacaatgtacaggtttgttacataggcatacatgtgccatgttggtttgctgcactcgtcaactcgtcatttacattaggcatttctccaaatgctatccctcccccagccccgctctgcccaacaggccctggtgtgtgatgttccctgccctgtgtccaagtgttctcattgttcaactcccagctatgagtgagaacatgtggtgtttggttttctgttcttgcgatagttcatttagaatgatggtttccagcttcatccatgtccctgcaaaggacgtgaactcattcttttttatggctgcatagtgcatagtattccatggtgtatatgtattgcacctatttttaacaggtgcttggaggaaaggctcccacataccattattattattgcaatatttgtattttgattttcactttagcacactttaaacctatgttaaacatatcttaatgaatatagacatatacaagagattgtttaaatgtatatgtgcagtttaaaaaaccatgacctcaaaatcaagcacatatgcgttcattagccaggtcttagacataggactttgttaattccccagatattccctgtgttcttttctgatctcttctgcctctctacctcctataggtaataactattatcctgaatttcatgttaattattaacctgcttttccttatagttttaaaaaatgccacctaagtatatatcccatggcaataaattgtttaatttggtctgggtctgaactttatataaatggaattgttctgtttatattcatttctgacttgcttctttttttcattattatgtttatgagatttattctgttgatatgtattgctacggttcgttcattttttcatggttgtataaatcccattttgtgaatacattatattttatttactgaatctattgttgatgacttgtttctaggttttgcaattataaacaacgctcctatgaacattcttacccataacttctgccacacatgcaagattggcaatagactagataaagctggaagtgagacacccaggtagaatgtatcagcagattcccctttatgaggcatttctaaatgtttcctaaagtagttgtaccaggggtcgtatcttttttgttatcctggtatcgctagcacctaggacaatgaatggccaagcacagttgctccatagatacttattgaatgaaggtagaaccacaaacagcatgttgtgacagtctttgtctataaattgttctgggcaataaagtcaaagcaagcactctttccaccccaactgtagcctgtagaatgggcctgtaggcttggcatcagaagatgtattttaataataataatgacaggagtgatacaatggtaatgtcttataccacttaaggattcttggaagacccggttagaattatggctgaagcaggtagaacctgctgagcaaaatgggtcccaactatcctttagaaattgatattctgatcccaaaggagccgttgagttgtaattatagattgctgaggggctagatcttgtggagctaagctgccttggaatgtgagttctttgtcatcttcttctggagcttggagtatataggtctttaacagaggagagcctaatgctgctagaatggttgtgaaagatcacaaatttacaatgctactgtgggagagagacagagatggaccttctgtgtagcctagcactgctaagccctgttcaaatgcaggttataagtttagataagacatgaatttaatcatgttctttgaaatacctctccataaaccagtattttaggtattccctgttatccaagccttatttaataaactggctctttagaatacctgtttattttgaaataattttatactcacagaagagttgcaaagatactatggggaatttctgtatatccttcactcaactttcactaatttttttttttttttttttttggagacagggtttcgctcttgttgcccaggctggagtgcaatggtgcaatctcggctcactgcaacttctgcctcctgggttcaagtgattctcctgcctcagcctactgagtagctgggattacaagcatgtaccaccatgcccggctaattttgtatttttagtagagacgggtttctccatgttagtcaggctggtctccaactcctgacctcaggtgatcctcccgccttggcctcccaaagtgctgggattacaggcgtgagccaccatgcccggccacctttcactaatgttaacatcttacataaccatggtacacttaccaaaactaagcaattcccattgatgcaacgctatttcaactatagactttattctgatatcaccaatttttataccaacgtcctttttctttccagaatgcaaaccaaaataccacgctgcgtagacatagttgttttgtctccataggctcctccagttggtgacagtttctcagtctccttgtttttcatgacttggtccctttaaatgatgttttttgggtattttgtagaatgtctctcaatttgggtttgtctgacgttttcccgtaattatactggtttggaaagaagaccacagatgtgagcttcccttatcatatcatgcgaggggatacaaaataaaatgactgatcactgtgatgttacccttgatcacttggtttagacggtgtctgcctgatctctccactataaaattacattttttccctttctgtactttattcattagatttgagtctctaagaccagcctacattcaggcagaagggaattaaactccacttcctgaagtgaggagtatcagagaatttgtggacatatattaaaatcactacagcaattaataaatatttaggggagatattttcaggctatggatatgtcccttttctccaagttgtttttttaactataagagagaagatagaacattcagaaccccaagaacagaaattagtcaaaataaatttttgataaaagtagtttattttattttttactgaaggtaataacattattatagtgataaagtaattactgtttattttcaggcctttctcttcactcagaagttgagcagttgaaacccacatgtagataaagtaagcttccctcataaccaagttctgtgaataacctccagtgatggtttccttctcttatttaataagcattgatgatatctattcacaattttattttgcttatttgggacactgaaatttgtccatattttttctaaatgaagaaaatggccaagaatacctccaacttacaatgcaaactcttttaagggtttcctggcataaaaaaaaaaagcctttacactatgagcttgtgagtctatactaactcccaggatcaatgttgaggaaaagttctgttaaaataatcttatagaatttttgccaaaatttcctagaaaccattaggtaaattttagaaaattagttttctttgtttaaaatgttgggttatacgtttcttattctattctgtgtccaaatcagaggttcctaacatgggttgtctgaattccttatcgatctgagttcttatttgctagtcacagaaactaactttgcttcttcaaacccaaaaaaggaatcagttaaaaggatattgggtatgattagagaatgggcttggagccatctatgcagccagaaatggttcctccagtttggctgcagaactgatcaatgaaaacacagcaatgctgatgattcagccagatggatcctgggccatccctagttctttgggtcactagcttctaattccagatctaggtcaggtataaagcttgacctgttcctgcaccctgactgcaagggaagctgagaaagtgagtatctcttcctttggtggagaaggctctgactccccaggcgtggagctccccaggaatagtaaaagggttcagatatgggcagctgacatgaatgacaattattcactacagaccccttacggatggaatcccttaagctgtagatttcatttggttctcaaataagccattcattcaacattccgcaaacatttatggagtacctaccatgtgccaggcactcttctaagtccttggatttcatcaatgaacaaaaccaagatcactgtttttgtggagtttctattctggcaggaaaagccaatacatcatccagacttgcacctcaaaacctccagtgggctcatgaattggtgataccagatatttctggaagtggcagtgaatgtaggactgaaacataagcattggttgaaaagactatttgagaagcaattcgacctgcattgttgaacagaacttttggcaatgatgaagacactctatttctgcactgtccaatacaaaagctaccagccacatgtggttattgagcacttgaaacgtggctatttccttactgcaactgaggaactgaattttaaattttacttaatttatgtaaatttatgtaaagtacatagctacagtggctagtggttactgtatcagagagcacagagttacatcctctgttccttcccccacttggaatggctggatgattacccctccctcagtgtaacagagttgtgcggtttattctctgaacgaaggggcaacatgaaggtaagaggatggggatatcatattgaaaagaggggcattacttgaatttgagaacctgctcttctcccaattgacttccaaaatgctggcagccagtttctacttccaggtatgagattaggaatttagtatctgataaatctgactagtccaaaagaaaagaccctgtgttaacattgggagttgtcctatgaaacaatccagccagattacctggggtaagacccagagttggcaacccaactcatatatcagaacttccaatcagatttttagtgctgtagtcttaaaggtgaacagacagttaaggatcactagacatttgaggatatcttcactctgaaaggaaatacaaacacctaagaaaagaaacaaaaaaataaatttgagaaaatagagagaattcagagagaagaaaaaaattaaagtaagataagagatgattttgcatccacaaagcaagaatagaatgctataataaagaaataatcagaaggccaggcgtggaggctcacacctgtaatcccgcacttcttgaggctgaggcaggcagatcatgaggtcaggagatcgagaccatcctggctaacacggtgaaaccccatctctactaagaatataaaaaaattagccagccatggtggcaggcacctgtagttccagcaactcgggaggctgaggcaggagaatggcatgaacctgggaggtggagcttgcagtgagccaagatcacgccactgcactccagcttgggcaacagagcgagactccgtctcaaaaaaaaaaaaaaaaaaaaaaatcagaaggacaaaaactagaagggtcttgggaaaaagtgacacaaatcagaagctccatataaaatttggaaaataagattgagggaatcttctagaaactagatagaatcagatggcaaagaaatgtaaactaggataaaaatataagaaaattaggtcagattaagaagtctaacacctgaataacacaaattcctcaaatagagaattgagaaaattatcagataaataattcaagaacatttcttagacttgaaggacatgagttttcagaatgaaaacaaccaccaagtgcctagcaaaatggatgaaaatagatccatatcaactcacctgatacggtttggatctgtgtccttacccaaatatcacgtggaaatgtaatctccaatgttgcaggtggaacctagtgggagataattgaatcatgggggcagtttctcatggtttagcaccatcaccctggttctgttcttgtgatggagttatcatgagattgggttgtttaaaagtatgtggtacctcccccttctctttctcctgctctcaccatgtaagatgggcctgcttccccttcgccttctgccatgactataagtttcatgaggcctccccagaaacagatgttgccatacttcttgtacagcctgtggaaccatgagccaattaaacctcttttcttcataaattacccagtctcaggtatttctttatagcaatgtgagaatagactaatacattacctgatgataatatttatgaacagtaaggacaaaggagaggtcctagaagcttccagagagctgaagggaaggttgtattcaaagaatcagaaatctgagtcactttggatattgtatgtgctctccaacctagaatgtgatacccagccgcaatatcaagtaagtgtaagggttgaataacttttttcagacatgaatggcctcaaatattttacctctcctacagctctttctcataaaaaattgaaagaaatgttctttcaaaacaaagaagtaaataaatgattattgtgttagttaatactgagtgtcaacttgattggattgaaggatgcaaagtattaatcctgggtgtgtctgtgagggtgttgccaaaggggattaacatttgagtcagtgggctgggaaaggcagacctacccttaatctgagtgggtaccatctaatcagctgccagcacagctagaatacaaagcaggcagaaaaacgtgaaaggagtagactggcctagcctcccagcctatatctttctcctgtgctggacccttcctgccctccaacatcagactccaagttcttcagttctgggactcggactggctttccttgctcctcagcttaccgatagcctattgtgggatcttgcaatcatgtgagttaatacttaataaactcccctatattataggatgtacatatatatcctattagttctgttcctctagagaactctgaccaacacagttatgaagatatagcatgtcagaaaaacggaatttattataataggggtgtgaacacaattttcaggatgatggtaaagggagacttctagatgaatctgtgtaatagaccaagagagcagccagaagattggagcaggtcagagagtttagaaagagataattccaaaatagagaactggcaatatctgagtatattgaaaggaaaattaggaaatcaggaaagagtctgaagatgatgtagcaagagttcataaaaaacaaagcaaaccagaaaaaaagcaaaacaagaaaaccagataagtatgaactctagagaaaacaaaaacgggagaaataaaaaattattctgatatattgcattgctaagccaaatatatcattcatataatcataatgtaaacattgaataatgataaaatcaaaattacgataaaaatgttgggggaatagaggcatggcatgtatgcccatgtatggtctgtgtgtgtgtgttgggaaataggggcagcgagagagctaaatgcatattttcagtagggaaaaccaataggtaatgcctaaaaataaaaactcaaaagagaaatttttacttgctattagaaatatgaaggtgttgtattattattatttttttctaatttggtcctgaggtctctctcatgagagtggcaataaactctagccctgccctgatggggctctagggatttggtcatggatgattacaatgttccttttaagggatacttctttatcctggcaatgacctaatgcccaagtgtctgacccatgaccaggtgtccctctcatagaaaacttctttacactggcagacaccagtgtaaacaacctggtggctttttgacttatgtccagtttattcctacaagatagccattccctagaagagccctaactgggaaagaagctcaggtgtgtcagttacatgcgacacagaagaggaagcagaacaacacacatgaaataacaggcagttcattacttacagatcccagaaagaagatggaagcatgactagtggggccaatgggtagtgggagaagtggggaggcatccaggacactcaagctcaactagcagatggggagcaaaagagaaagagcaagagatctgtgggccaaagctggtaccggggttcaaggtattacccgggctggtttctcttggggagttctaattcgtgtgtttagagcaaccagcacaaattccctggggtcacattatgacttaaaactggtcactgtggcatatttttgcagtcatgtggggtgagagggtcagtggaacaagtcaagtaggttgtatctggctgtcccatagggaggtggtcaccaggaggtggtggtataagggagatatttggatcaaccacattgaggaattgggaagaggtagagaacaggaaactttgtcaagggtgtctaagccctgcctctggtgtgagaatgtccaacttatattcaaaaggatgctgaagttgggcatggtggctcacacctgtaatcccagctacttgggaggctgaggcacgagaatcacttgaacctgggaggcagaggttgcagtgagccaagatcatgccattgcactccagctggggtgacagagtgagactccatatcaaaaatcaaaaataaaaataagaaaaacaaaaaaacaaaaaaaatagaacgcaaaatgtatgctgaggcaacataaaattgtaagaattcactacaagaggtaaataccaaaataaatagctaaaagtctttactggagtggagggaaggttgcgggagaacaactgttttccattataaatagcccttgtagaactatatggctttttaaactgtttgcatatataatttcaattaaggtaaaaacaaacacaacaatgaaaatacaatagaaatgaggtatcattaattgggacagcaagctttctcaacttctgaaaagttgtttggggaaagattaaaaatatttcagggccaagtgcggtggctcatgcctgtaatcccaacactttgggaggccaaggtgggcggatcatgaggtcaggagatcgtgaccatcctggctaatacagtgaaaccccgtctctactaaaaatacaaaaaaattagccaggcatggtggcgggcgcttgtagtgccagctactcgggaggctgaggcaagagaatggtgtgaacctgggaggcggcggagcttgcagtgagcggagatagtgccagtgcactccagcctgggcgacagagcgagactccgtctcaaaaaaaaaaaaaacaaaacatactttcggaagacaaattctcgccttcactcttctgagctggtagaagtaaactagtttgtgaaaattttcgcaacctactcatctgacaaagggctaatatccagaatctacaatgaactcaaacaaatttacaagaaaaaaacaaccccatcaaaaagtggacaaaggacatgaacagacacttctcaaaagaagacatttatgcagccaaaaaacacatgaaaaaatgctcaccatcactgggcatcagagaaatgcaaatcaaaaccacaatgagataccatctcacaccagttagaatggcaatcattaaaaagtcaggaaacaacaggtgctggagaggatgtggagaaattggaacacttttacactgttggtgggaccgtaaactagttcaaccattgtggaagtcagtgtggtgattcctcagggatccagagcttgacataccatttgacccagccatcccattactgggtatatacccaaaggactataaatcatgctgctataaagacacatgcacatgtatgtttattgcggcactattcacaatagcaaagacttggaaccaacccagatgtccaacaatgatagactggattaagaaaatgtggcacatatacaccatggaatactatgcagccataaaaaatgatgagttcatgtcctttgtagggacatggatgaaattggaaatcatcattctcagtaaactatcgcaaggacaaaaatccaaacatcgcatgttctcactcataggtgggaactgaacaatgagaacacatggacacaggaaggggaacatcacactctggggactgttgtggggtgggaggaggggggagggatagcattaggagatatacctaatgctaaatgacgagttaatgggtgcagcacaccagcatggcacatgtatacatatgtaactaatctgcacatcgtgcacatgtaccctaaaacttaaagtataataataataataataaaaaagaagtaaactagtttgttgctgcgaatatctgaaataataaaaattcctatggccttgcatagcttttttttcccccaaaagtaatgtggagaatatatgtttagtttacctaggcccctttcttgccttctcctggtaacagcacatcttatttttggaaatggctttatttagatttcaaccaatactgatggatgcttcatggttctttttcctgggccacagagatggacacatgactgagtctgagccaatcatcatttaggctcccctggtcacatgactagcccaggaatgggcacatgactcacataaggccaattaggtcccttctttttccaactgaaactgctggagaagagcagggtttttgttttgtttcgttttgttttgttttgaactcttgtccatgtggctagagagataaaagcctagaccacctgtagccatatttccattgtgtgaggtcaattgttcagagaagttgaagcaaatatttagatagatacaaagaagagaaagaggattgcagggagaatggcctcagctcaccctgagtctcgcttcatgtctgcccttttcatagtttgaattcagaaaccaacaaatccatcccccccttttctgacaaagctggagttggagttttgtcacttgcaatcaaagggttcagaccaatcctagtagcgatcatgttttgtattaggcaagaaaaagttttccacattcgagaagatggcatacagacataattatatctatggggtacatgtgttatttgatacataaatacaatgtctaatgatcaaatcttaagtttttttaaacaatagggattacagtattgaaatatctctcagatgagactgaaaagtaacctgatggtttgatgctggatatggagctacactgtgtcaaccccagaagtaagaatggtcagtttttgctgtttgtgctcagctaactttgattcaattcaaaatgccaagttatgcattttagagtcaataaaaaattatacttaaagagttaaaaaccacgtttagggtttagtgatgatcttctggacactgtgttagattggcacttgaagaaattcagaataagtataatgtatagtttatgccctcctgtagcttaagatcagttagggagagatgatataaacttgtgaaacatttcattatatagcataagatctgtaggcactcacccaaagaagtgagctattctttgggtgcaacttctggccggtttagtctagaactttcttgtaagtctcctctgtgtagaccatcattccccccaacccctctttttctttcttctttgcctgggctcaaacccaggcatggggccaacgacctcagcaatgaatgggattagagcagctagccagctttttcaggttagactgtaaatgaacacccttggtacagacatgaggccaaggaactctagtgctttgttaggaagaaagtgaaaagctcagctctcccgtgggccagaaatgctgagcctgcaggatcctcagcgaaatgtaagaaactgcttcgcaatggcttgactcctccacgatggccctgctctcatcagatgcttttcctgttcctacaggcaggcatcgcccagaggaggaggggatggcaaggtgccagccgtaaataatgaatagcaccctcatttacattcttttttagtggcgcctgtttgcacgcagcattgcaggaacctagagcccgaggaaatatgacttggagccggctcaggctgcctccctccagtgtgcctagctcaggaaaaggcagagctcttcccgtcagaccatctggcgctcgtgaatgtgcttattagtaacagggaaggtgggtctgttagcctgggacagcatctcggaggcagatgctgagtttatgtgtaaaatatggcttccagccaaagcactaatcatgatcgcctctgaagtggttccaatcgtctggatgaggcggctcctgctcttatgttgtttgtacaagctggtagttacaggtgttgtatacaagatatttgtagtcataatttctccaaacaggttaaggcaaacattatgagaatcagcgtattaatgtgctgtgtttcaaattagaattataaacacactttcctcattggaggcctaatctgctaagaagaagccagatgtttaatgatgaaaccattattcagaaggacctatcaaagtaaaacaaattgttgttgtttaagcggagaaaaaaacctgctttatgcaagggaacttagaaaaactgctttgagaggatcggtgcttgtactgaatttccatgtaccctttgctgctgctcaagagccagggtttcttctggaaacatcatttagcagatgggaatccggccttcctaggacaaatctacaggccaggccagctcatttccttgtgcacaaatggtacctgacatgctgacatgctggagtagtcgaatgggaacaagttggtctaggaggctttttgatgttaactttttttttttttgtgagacagggtcttggtctatcactcaggctagagtgcactggcactgtctcagctcactgcaacctctgcctcccgggttcaagtgatcctcccacctcagcctcccaagtagctgggattataggcatgccccatcacacctggctaattttttctactttttcgtggagacgaggtttcgccatgttgcccaggctggtctccctggattcaagtgatcctcccaccttgacctcccaaagtgctgagactacaaggtgtgagccactgcgcatggcctgatgttaacttttgatgttaatttcccttactctctttgtattttttcgaggaaagaattaggaagcagtgtttggtgatggttgacatttgcccttcgcttgccgtctgagctgcttcatgtagaactgactcccacattccagctgctcaactgtaatcattccattagccccttattgtgtttaaggaagtgcaaccccatgcttgttgtatctgtctgtgattgtatctttcttctcttttctccctccttcccctccatattccacttagttcctcatcctctcctgccttcccattccctatttccttctcctttccttcttcctcctttcctatagaaaatacatctttgagaatatatccaattgctaccttgaaccaaagagcacacaaaaagcaggaagaagcacaaagataggcatcggaggtggtttatgaaagcttgatgtgatcacagatcttgccataaatattcaaaatatttgactactatttttaagagtttcagtttattcattttcccaaagctcttcttgctgctggtaggattttttggactaagcccttttggagtacatgaggctgtttactagcaaattaatggaggcctttttgacatacacaaattttagtagttacaatgatgagagaaatagcagcttgaagaagttagaacccatggggatctggaggcttcccttttgctgagttctagaatttgtgaggtatcaagttttgagagaatccagagaagtcagtcagcacctcacctgaagttcttccacaaaactgggagaatgcacatggcctcaagggctcatcactttttccattataagggaccaagaaagaaattgactgggtttgatggctcacacctgcaatcctagcactttgggaggctgcaatgggaggattcctggcgtctgggagtttgagaccagcctgggcaacatagcaaggcctcatctctactaaaaataaaaaatcagcttggtgtggtggtactcacctgtagcccagctacttgggaggctgaggtgggaggatcacttgagccagggaggttgaggctgtagtgagccatgatcacacgactgcacttggcctggacaacagagtaagaccctgtctgaaaaaaaaaataaagtaaataagtaaattattccgtaaagatgagaattcggtctgtcattgaaggtgtcttccgcatggaagccttttgcataattgcacactactgttgtctctccttgacctccaatagctctcccaatgttttaagctaaatattctcattaacttgaatcattcctcacatgacagggcttgagtctcttcgctattgtggtcacttgcttcaaacaagttatagcttgttcttctagccacaggtcctagaagtgaaagtaggatccaagcaacagtgagtgtggagtgggttctgatgtgtgtagagcatagtagctgttattgagatctaagtcacattatctacattttactggtgagtaatactgggtttcttgttgactaaatctcttttctgttgagggggagtctcgctctgtcgccaggctggagtgcagtgacacaaccttggttcactgcaacctctgcctcccaggttcaagcgattctcctgcctcagcctccaaagtagatgggataacaagcacgtgccaccatgctaagctaatttttgtgtttttagtagagatggggtttcaccatgctggccaggatggccttgatctcctgacctcatgatccgcctgccttggcctcccaaagtgctgagattacaggtgtgagtcactgtgcctggccaatttctgcctattttttattttatttatttattttgagacggagtctccctctgtcacccagactggagtgcagtggcatgatcttggctcactgcaacctctgtctcccaggttcaagcacttctcctggcttagcctcccgaatagctgggactacaggcgcatgccactacccttggctgatttttatatttttagtggagatggggttacaccacattggctaggctggtctcaaactcccaacgtcaggtgatctgcccccctcagcctcccaaagtgctgggattacaggcatgagccactgcacccagtcctctgtttcttttttaataggataaacgtatacttctataatttttttctaccaaagcgatattgtttggctgtgttgccattcaaatctcaactgaattgtatctcccagaattcccacgtgttgtgggaggggcctagagggaggtagtcgaatcatgcgggccagtctttccagtgctattctcatgatagtgaataagtctcacgagatccgatgggtttatcaggggtttccgcttttcctttgctctcattttctcttgccactgccatgtaagaagtgcctttcacctcccgccatggatctgagtcctcccaagccatgtggaactgtaagtccaattaaacctctttttcttccctgtctcgggtatgtctttatcagcagtgtgaaaccggactaatacagtacattggtgccaggagtgggatgttgctgaaaagatacccgaaaatgtagagggactttggaactggtaacaggcagaggttggaccagtttggagggctcagaagaagacaggaaaatttgggaaagtttggaacctcctagagatttgttcaatggctttgacaagaatgctgatagtgatatgaacaatagggtccaggctgaggtggtctcaggtggagatgaggaacttgttgggaactggagcaaaggtgactcttcttatgttttagcagaggctggtggcgttttgcccctgccttagagatttgtggtactttgaacttgagagagataatttagggtatctagtggaagaaatttctaagcagcatagcattcaagagctgacttgggtactgttaaaagcattccaattttaaaagggaaacagagcataataagttcagaaaattggaacttgatgatgcagtagaaaagaaaaacccatttttaaaggagaaattcaaggcagctgcagaaaattacataagtagcaaggaactactaatgttaatccccaagaccatggggaaaatgtctccagttcctgtcagagaccttcactgcagaccctcccatcacaggcccagaggcccaggaggaaaaagtggttctgtgggctgggttcagggtccccatgctgtgtgaagcctagggacttggtgccctgtgtcccagctgctccagccttggctgaaaggggctaatgtatagctctggctgtggctttagagggtggaagccccaagccttggcagcttcttccatgtggtgttgagcctgtgggtgcacagaagtcaagaactgaggtttgggaacctctgctagattccagaagatgtatggaaatgcctggatgcccaggcaaaagtttgctgcaaggttggggccctcatggagaacctctgctagggcagtgtggaagggaaatgtggggttggagcccccgcacagtgcccctgctggggcactgcctagtggagctgtgagaagagggccaccatcctccagaccccagaatggtagatccatcaacagcttgcactgtgcacttggaaaagccgcagacactcgacaccagcccatgaaagcagctgggagggaggctataccctgcaaagacacaggggcagagctgcctaagaccatgggaacccacctcttgcatcagcatgacctggatatgagacttggagtcaaaggagatcattttggagctttgaaatttgattgccccgctggatttcagacttgtgtaggcctgataacccctttgttttgggcaatttctcccattttgaatggctacatttacccaatacctgtacccctattgtatctaggaagtaactggcttgtttttgattttacaggctcataggcagaagggacttgccttgtctcagatgagactttggactgtgaacacttggcttaattctgaaatgagttaagactttgggggaccgttgggaaggcatgattggttttgaaatgtgaagacatgagatttggaggggccaggagcaaatgatatggtttggctgtgtcctcattcaaatctcaactgaattgtatctcccagaattcccatgtgttgtgggaaggacctagggggaggtaattgaatatgggggccagtctttccagtgctattcttgtgatagtgaataagtctcatgagatctgatgggtttatcagaggtttccgcttttgtttcactctcattttctcttgctgccaccatataagaagtgccttttgcctcccgccatgatcctgaggtctccccagctgtgtggaactgtaaatccaattaaacctctttttcttcccagtctcgagtatgtctttatcagcagtgtgaacatggagtaatacacaaagtaaagacatttatgtttatcatggctaatttacatcttatttaatacctgcagcttattattctagctttcaagttcccctttttgtttcatccatattgtgctttgttgttgggcccatggaaatgaccttctttgtttaatggtttgagctttttttgtgagggaaatcctagatttctgcaagatgaggagactaatggagggttcattagaaaggagaagaaagagtctgagtgagcacacttgttcaaatggcagagttactcccaatttaacaacagagtgaaatgggaaaagagaaacaggtaaacacaacgactgagcaactgtgactatgaatttgaagacatcatgaaaacttgaaaacagtctggctactcaaaacatagaacacagtcacaagcactgaatttaaattgccaagcattagagcagttatgtgaaacttaataccctctccgaggggctgttacaagatcaaatgagatcatatatgagaaagatcttagcatgaagctagaaacttagtagggaatcaataaaaacatgtctcgtaggaatgccttcttcttggcctatctctatatcttgactttgggcttcatctttttctttttattctcgtaggtaattgcatgcagtcctttagcactcttcacttctcacatttctcatgtctaacatatctttttgtgaacaaaatcatgtttatgatctccctattcattgtgatttcacagcctttgatagttctgccttttgttctccatcttcccagactgaaggtcctaagatttaggccagcaaactccctgtctcctccctcactccaatgcccttctctagacttttcctagctctctgcttttcttgaaggaggacttcttgtaaggcttggcaggtgtcaccctaggctccctgtcctcctggttgtctgagacttagtttcttcatgtctaaaatgggacatgaagtcaataatgccacgagaggactagatgagctttaagcgtgttgatgaatatgagtcgcctaaagtattgccttgcacagaggcgctcaaagatgtcatggttaaaacaatctcattaagtctctttttgtagtttgacttagaagcaattcgtgtggaatatgcaagcctctttgaaaagttcaccctgtagatttctgatgaggaatacaaaaatgatttttctaaccactaatgggttaaccccttctagcctcatgggaacttatcatgtgcgtggtgaattgtgtgagaggaagccctgttgaagcagtcattctgtcccactcccctgcaaaccatcactttggtggctgacagcttccaggaccaggacttatgggttccaccaatcttacaggaacacacctctgaaaatgttcatctctatgtcaccaatgaacctatataccagtaacaaaagtgatgatgatgatgatgatgatgataatgacttctattattgagccacctactatgtgccaggtcctgtactaggtcctgagaacaaaaagatgaacaagtcagtcatagattacagacggtctacgtagaactcctatctcagtgcctgacacaaa

SEQ ID NO: 322 - DNA, 1539 bp, Homo sapiens
gggaggatgtggcgggtataaaagccccacccaggccagccggctctgctcagcatttggggacgctctcagctctcggcgcacggcccagcttccttcaaaatgtctactgttcacgaaatcctgtgcaagctcagcttggagggtgatcactctacacccccaagtgcatatgggtctgtcaaagcctatactaactttgatgctgagcgggatgctttgaacattgaaacagccatcaagaccaaaggtgtggatgaggtcaccattgtcaacattttgaccaaccgcagcaatgcacagagacaggatattgccttcgcctaccagagaaggaccaaaaaggaacttgcatcagcactgaagtcagccttatctggccacctggagacggtgattttgggcctattgaagacacctgctcagtatgacgcttctgagctaaaagcttccatgaaggggctgggaaccgacgaggactctctcattgagatcatctgctccagaaccaaccaggagctgcaggaaattaacagagtctacaaggaaatgtacaagactgatctggagaaggacattatttcggacacatctggtgacttccgcaagctgatggttgccctggcaaagggtagaagagcagaggatggctctgtcattgattatgaactgattgaccaagatgctcgggatctctatgacgctggagtgaagaggaaaggaactgatgttcccaagtggatcagcatcatgaccgagcggagcgtgccccacctccagaaagtatttgataggtacaagagttacagcccttatgacatgttggaaagcatcaggaaagaggttaaaggagacctggaaaatgctttcctgaacctggttcagtgcattcagaacaagcccctgtattttgctgatcggctgtatgactccatgaagggcaaggggacgcgagataaggtcctgatcagaatcatggtctcccgcagtgaagtggacatgttgaaaattaggtctgaattcaagagaaagtacggcaagtccctgtactattatatccagcaagacactaagggcgactaccagaaagcgctgctgtacctgtgtggtggagatgactgaagcccgacacggcctgagcgtccagaaatggtgctcaccatgcttccagctaacaggtctagaaaaccagaaaaaattagccgggcgtgggggcgggctcctgtagtcccagctactccggaggctgaggcaggagaatggcgtgaacccaggaggcggatgagccaagatcacgccactgcactccagcttgggcaacagagcgagactcgcggtggctcatgcctgtaatcccaacactttgggaggccaaggtgggcggatcatgaggtcaggagatcgtgaccatcctggctaatacagtgaaaccccgtctctactaaaaatacaaaaaaattagccaggcatggtggcgggcgcttgtagtgccagctactcgggaggctgaggcaagagaatggtgtgaacctgggaggc

SEQ ID NO: 323 - protein, 337 aa, Homo sapiens
MSTVHEILCKLSLEGDHSTPPSAYGSVKAYTNFDAERDALNIETAIKTKGVDEVTIVNILTNRSNAQRQDIAFAYQRRTKKELASALKSALSGHLETVILGLLKTPAQYDASELKASMKGLGTDEDSLIEIICSRTNQELQEINRVYKEMYKTDLEKDIISDTSGDFRKLMVAKGRRAEDGSVIDYELIDQDARDLYDAGVKRKGTDVPKWISIMTERSVPHLQKVFDRYKSYSPYDMLESIRKEVKGDLENAFLNLVQCIQNKPLYFADRLYDSMKGKGTRDKVLIRIMVSRSEVDMLKIRSEFKRKYGKSLYYYIQQDTKGDYQKALLYLCGGDD

SEQ ID NO: 324 - DNA, 1562 bp, Homo sapiens
attccagcaggaaaacaggatggaggaaggtacaaagcatgaatgagcctggcctgtccagcagtggcacatggagcggtgaagagtgaagatgtgggggaatgaggctgcccagcttccttcaaaatgtctactgttcacgaaatcctgtgcaagctcagcttggagggtgatcactctacacccccaagtgcatatgggtctgtcaaagcctatactaactttgatgctgagcgggatgctttgaacattgaaacagccatcaagaccaaaggtgtggatgaggtcaccattgtcaacattttgaccaaccgcagcaatgcacagagacaggatattgccttcgcctaccagagaaggaccaaaaaggaacttgcatcagcactgaagtcagccttatctggccacctggagacggtgattttgggcctattgaagacacctgctcagtatgacgcttctgagctaaaagcttccatgaaggggctgggaaccgacgaggactctctcattgagatcatctgctccagaaccaaccaggagctgcaggaaattaacagagtctacaaggaaatgtacaagactgatctggagaaggacattatttcggacacatctggtgacttccgcaagctgatggttgccctggcaaagggtagaagagcagaggatggctctgtcattgattatgaactgattgaccaagatgctcgggatctctatgacgctggagtgaagaggaaaggaactgatgttcccaagtggatcagcatcatgaccgagcggagcgtgccccacctccagaaagtatttgataggtacaagagttacagcccttatgacatgttggaaagcatcaggaaagaggttaaaggagacctggaaaatgctttcctgaacctggttcagtgcattcagaacaagcccctgtattttgctgatcggctgtatgactccatgaaggtaagggcaggcgagataaggtcctgatcagaatcatggtctcccgcagtgaagtggacatgttgaaaattaggtctgaattcaagagaaagtacggcaagtccctgtactattatatccagcaagacactaagggcgactaccagaaagcgctgctgtacctgtgtggtggagatgactgaagcccgacacggcctgagcgtccagaaatggtgctcaccatgcttccagctaacaggtctagaaaaccagaaaaaattagccgggcgtgggggcgggctcctgtagtcccagctactccggaggctgaggcaggagaatggcgtgaacccaggaggcggatgagccaagatcacgccactgcactccagcttgggcaacagagcgagactcgcggtggctcatgcctgtaatcccaacactttgggaggccaaggtgggcggatcatgaggtcaggagatcgtgaccatcctggctaatacagtgaaaccccgtctctactaaaaatacaaaaaaattagccaggcatggtggcgggcgcttgtagtgccagctactcgggaggctgaggcaagagaatggtgtgaacctgggaggc

SEQ ID NO: 325 - protein, 285 aa, Homo sapiens
MSTVHEILCKLSLEGDHSTPPSAYGSVKAYTNFDAERDALNIETAIKTKGVDEVTIVNILTNRSNAQRQDIAFAYQRRTKKELASALKSALSGHLETVILGLLKTPAQYDASELKASMKGLGTDEDSLIEIICSRTNQELQEINRVYKEMYKTDLEKDIISDTSGDFRKLMVAKGRRAEDGSVIDYELIDQDARDLYDAGVKRKGTDVPKWISIMTERSVPHLQKVFDRYKSYSPYDMLESIRKEVKGDLENAFLNLVQCIQNKPLYFADRLYDSMKVRAGEIRS

SEQ ID NO: 326 - DNA, 1349 bp, Homo sapiens
gggaggatgtggcgggtataaaagccccacccaggccagccggctctgctcagcatttggggacgctctcagctctcggcgcacggcccagcttccttcaaaatgtctactgttcacgaaatcctgtgcaagctcagcttggagggtgatcactctacacccccaagtgcatatgggtctgtcaaagcctatactaactttgatgctgagcgggatgctttgaacattgaaacagccatcaagaccaaaggtgtggatgaggtcaccattgtcaacattttgaccaaccgcagcaatgcacagagacaggatattgccttcgcctaccagagaaggaccaaaaaggaacttgcatcagcactgaagtcagccttatctggccacctggagacggtgattttgggcctattgaagacacctgctcagtatgacgcttctgagctaaaagcttccatgaaggggctgggaaccgacgaggactctctcattgagatcatctgctccagaaccaaccaggagctgcaggaaattaacagagtctacaaggaaatgtacaagactgatctggagaaggacattatttcggacacatctggtgacttccgcaagctgatggttgccctggcaaagggtagaagagcagaggatggctctgtcattgattatgaactgattgaccaagatgctcgggatctctatgacgctggagtgaagaggaaaggaactgatgttcccaagtggatcagcatcatgaccgagcggagcgtgccccacctccagaaagtatttgataggtacaagagttacagcccttatgacatgttggaaagcatcaggaaagaggttaaaggagacctggaaaatgctttcctgaacctggttcagtgcattcagaacaagcccctgtattttgctgatcggctgtatgactccatgaagggcaaggggacgcgagataaggtcctgatcagaatcatggtctcccgcagtgaagtggacatgttgaaaattaggtctgaattcaagagaaagtacggcaagtccctgtactattatatccagcaagacactaagggcgactaccagaaagcgctgctgtacctgtgtggtggagatgactgaagcccgacacggcctgagcgtccagaaatggtgctcaccatgcttccagctaacaggtctagaaaaccatacaaaaaattagccgggcgtgggggcgggctcctgtagtcccagctactccggaggctgaggcaggagaatggcgtgaacccaggaggcggatgagccaagatcacgccactgcactccagcttgggcaacagagcgagactccgtctcaaaaaaaa

SEQ ID NO: 327 - protein, 337 aa, Homo sapiens; identical to SEQ ID NO: 323

SEQ ID NO: 328 - DNA, 1563 bp, Homo sapiens
attccagcaggaaaacaggatggaggaaggtacaaagcatgaatgagcctggcctgtccagcagtggcacatggagcggtgaagagtgaagatgtgggggaatgaggctgcccagcttccttcaaaatgtctactgttcacgaaatcctgtgcaagctcagcttggagggtgatcactctacacccccaagtgcatatgggtctgtcaaagcctatactaactttgatgctgagcgggatgctttgaacattgaaacagccatcaagaccaaaggtgtggatgaggtcaccattgtcaacattttgaccaaccgcagcaatgcacagagacaggatattgccttcgcctaccagagaaggaccaaaaaggaacttgcatcagcactgaagtcagccttatctggccacctggagacggtgattttgggcctattgaagacacctgctcagtatgacgcttctgagctaaaagcttccatgaaggggctgggaaccgacgaggactctctcattgagatcatctgctccagaaccaaccaggagctgcaggaaattaacagagtctacaaggaaatgtacaagactgatctggagaaggacattatttcggacacatctggtgacttccgcaagctgatggttgccctggcaaagggtagaagagcagaggatggctctgtcattgattatgaactgattgaccaagatgctcgggatctctatgacgctggagtgaagaggaaaggaactgatgttcccaagtggatcagcatcatgaccgagcggagcgtgccccacctccagaaagtatttgataggtacaagagttacagcccttatgacatgttggaaagcatcaggaaagaggttaaaggagacctggaaaatgctttcctgaacctggttcagtgcattcagaacaagcccctgtattttgctgatcggctgtatgactccatgaagggcaaggggacgcgagataaggtcctgatcagaatcatggtctcccgcagtgaagtggacatgttgaaaattaggtctgaattcaagagaaagtacggcaagtccctgtactattatatccagcaagacactaagggcgactaccagaaagcgctgctgtacctgtgtggtggagatgactgaagcccgacacggcctgagcgtccagaaatggtgctcaccatgcttccagctaacaggtctagaaaaccagaaaaaattagccgggcgtgggggcgggctcctgtagtcccagctactccggaggctgaggcaggagaatggcgtgaacccaggaggcggatgagccaagatcacgccactgcactccagcttgggcaacagagcgagactcgcggtggctcatgcctgtaatcccaacactttgggaggccaaggtgggcggatcatgaggtcaggagatcgtgaccatcctggctaatacagtgaaaccccgtctctactaaaaatacaaaaaaattagccaggcatggtggcgggcgcttgtagtgccagctactcgggaggctgaggcaagagaatggtgtgaacctgggaggc

SEQ ID NO: 329 - protein, 337 aa, Homo sapiens; identical to SEQ ID NO: 323

SEQ ID NO: 330 - DNA, 1608 bp, Homo sapiens
gggaggatgtggcgggtataaaagccccacccaggccagccggctctgctcagcatttggggacgctctcagctctcggcgcacggcccagcttccttcaaaatgtctactgttcacgaaatcctgtgcaagctcagcttggagggtgatcactctacacccccaagtgcatatgggtctgtcaaagcctatactaactttgatgctgagcgggatgctttgaacattgaaacagccatcaagaccaaaggtgtggatgaggtcaccattgtcaacattttgaccaaccgcagcaatgcacagagacaggatattgccttcgcctaccagagaaggaccaaaaaggaacttgcatcagcactgaagtcagccttatctggccacctggagacggtgattttgggcctattgaagacacctgctcagtatgacgcttctgagctaaaagcttccatgaaggggctgggaaccgacgaggactctctcattgagatcatctgctccagaaccaaccaggagctgcaggaaattaacagagtctacaaggaaatgtacaagactgatctggagaaggacattatttcggacacatctggtgacttccgcaagctgatggttgccctggcaaagggtagaagagcagaggatggctctgtcattgattatgaactgattgaccaagatgctcgggatctctatgacgctggagtgaagaggaaaggaactgatgttcccaagtggatcagcatcatgaccgagcggagcgtgccccacctccagaaagtatttgataggtacaagagttacagcccttatgacatgttggaaagcatcaggaaagaggttaaaggagacctggaaaatgctttcctgaacctggttcagtgcattcagaacaagcccctgtattttgctgatcggctgtatgactccatgaagggcaaggggacgcgagataaggtcctgatcagaatcatggtctcccgcagtgaagtggacatgttgaaaattaggtctgaattcaagagaaagtacggcaagtccctgtactattatatccagcaagacactaagggcgactaccagaaagcgctgctgtacctgtgtggtggagatgactgaagcccgacacggcctgagcgtccagaaatggtgctcaccatgcttccagctaacaggtctagaaaaccagcttgcgaataacagtccccgtggccatccctgtgagggtgacgttagcattacccccaacctcattttagttgcctaagcattgcctggccttcctgtctagtctctcctgtaagccaaagaaatgaacattccaaggagttggaagtgaagtctatgatgtgaaacactttgcctcctgtgtactgtgtcataaacagatgaataaactgaatttgtactttagaaacacgtactttgtggccctgctttcaactgaattgtttgaaaattaaacgtgcttggggttcagctggtgaggctgtccctgtaggaagaaagctctgggactgagctgtacagtatggttgcccctatccaagtgtcgctatttaagttaaatttaaatgaaataaaataaaataaaatcagttcctg

SEQ ID NO: 331 - protein, 337 aa, Homo sapiens; identical to SEQ ID NO: 323

SEQ ID NO: 332 - DNA, 1622 bp, Homo sapiens
ggggacgctctcagctctcggcgcacggcccaggtaagcggggcgcgccctgcccgcccgcgatgggccgccagctagcggggtgcggagacgctgggaagaaggcttccttcaaaatgtctactgttcacgaaatcctgtgcaagctcagcttggagggtgatcactctacacccccaagtgcatatgggtctgtcaaagcctatactaactttgatgctgagcgggatgctttgaacattgaaacagccatcaagaccaaaggtgtggatgaggtcaccattgtcaacattttgaccaaccgcagcaatgcacagagacaggatattgccttcgcctaccagagaaggaccaaaaaggaacttgcatcagcactgaagtcagccttatctggccacctggagacggtgattttgggcctattgaagacacctgctcagtatgacgcttctgagctaaaagcttccatgaaggggctgggaaccgacgaggactctctcattgagatcatctgctccagaaccaaccaggagctgcaggaaattaacagagtctacaaggaaatgtacaagactgatctggagaaggacattatttcggacacatctggtgacttccgcaagctgatggttgccctggcaaagggtagaagagcagaggatggctctgtcattgattatgaactgattgaccaagatgctcgggatctctatgacgctggagtgaagaggaaaggaactgatgttcccaagtggatcagcatcatgaccgagcggagcgtgccccacctccagaaagtatttgataggtacaagagttacagcccttatgacatgttggaaagcatcaggaaagaggttaaaggagacctggaaaatgctttcctgaacctggttcagtgcattcagaacaagcccctgtattttgctgatcggctgtatgactccatgaagggcaaggggacgcgagataaggtcctgatcagaatcatggtctcccgcagtgaagtggacatgttgaaaattaggtctgaattcaagagaaagtacggcaagtccctgtactattatatccagcaagacactaagggcgactaccagaaagcgctgctgtacctgtgtggtggagatgactgaagcccgacacggcctgagcgtccagaaatggtgctcaccatgcttccagctaacaggtctagaaaaccagcttgcgaataacagtccccgtggccatccctgtgagggtgacgttagcattacccccaacctcattttagttgcctaagcattgcctggccttcctgtctagtctctcctgtaagccaaagaaatgaacattccaaggagttggaagtgaagtctatgatgtgaaacactttgcctcctgtgtactgtgtcataaacagatgaataaactgaatttgtactttagaaacacgtactttgtggccctgctttcaactgaattgtttgaaaattaaacgtgcttggggttcagctggtgaggctgtccctgtaggaagaaagctctgggactgagctgtacagtatggttgcccctatccaagtgtcgctatttaagttaaatttaaatgaaataaaataaaataaaatcagttcctg

SEQ ID NO: 333 - protein, 355 aa, Homo sapiens
MGRQLAGCGDAGKKASFKMSTVHEILCKLSLEGDHSTPPSAYGSVKAYTNFDAERDALNIETAIKTKGVDEVTIVNILTNRSNAQRQDIAFAYQRRTKKELASALKSALSGHLETVILGLLKTPAQYDASELKASMKGLGTDEDSLIEIICSRTNQELQEINRVYKEMYKTDLEKDIISDTSGDFRKLMVAKGRRAEDGSVIDYELIDQDARDLYDAGVKRKGTDVPKWISIMTERSVPHLQKVFDRYKSYSPYDMLESIRKEVKGDLENAFLNLVQCIQNKPLYFADRLYDSMKGKGTRDKVLIRIMVSRSEVDMLKIRSEFKRKYGKSLYYYIQQDTKGDYQKALLYLCGGDD

SEQ ID NO: 334 - DNA, 417026 bp, Mus musculus
  misc_feature (1)...(417026): n = A,T,C or G
gctctcagggataggaggatgccccatagggaagctagagggtgaagcaaatctacccaaagtttcatttctggtcatacactaagccagtcacatcccgcacaattcaggaagtggctctggcaagtggctctggcacagggcagaagctgtgcatctgaaaaggcctgataggtgcccttgtggtatcgtcccatggccggtttgaagtcactgtttggtgtctgagaaaacagaggaacggtcaaccatggagtcacacccagaacaggcattagttagcatggacatgtcagaggacccgaagtagagaccgaggcatgcagctgtatgcagcagaggcagccgaggttgaaggcctctgggaccagttctgccacagcaggtttcatcagacccttcagaagcacttgctaggacgcagagggcttgatccaccccatttcatagcccaggagtgatgacaagtctccagatgtcaccagtgcaacctgtaagaggaccaccacgctctgaaagatggatgacggttgtcaggagcttgcccctggccagagagggtgtgaagacttcatctgttcctgttctggctgagggctcgcctggaaggttccggaaggagcaggtgcattgcgagctcattcagacttctgcagacacagtcacagacttggggtgctctctgcatttcaagtgccacatcttgcctctccgtgtgcccccatgcatggcttccctcctcccccactaaatctttccacctgttccctctcacctgaggcctgagggagggcgggggcgggggtggggtgaagaagggtgaggactgaggggcgagtctagatacagagctgtgatttcacttctggcaggcatctttggaacccaggtggggtgcagggccaccacctgcagtgagagggtcacacctcctacctgctctctggggctcattagctgctgaggtaaggctcagtctctctctctctctctctctctctctctctctctctctctctctctctctctctttctctctctcacatttgctgagtttttgctgagactcaaagagggaaatgagccactgccactcagcaagcactctttgaaacagaaactgagccttctgcattttctaatgatgccctgtgatctaaaaatgcagaagtctggccttgcgtcttcaaaagtcccctttctgaaaagaggtgtctggagctcaccttctgcttaccaagctcccagggatggaacggtcaggtgcccccccaacatgtcaggccagctgatgccagcttcctgctgagtgattggcctctgggtggttgtgaggagatggcaaaagtcccaactcttccttttctgtttttttttttttttttgttctttgccattcctcacatcttgtcctattgtgtaaaagtcagccactttgtcctattgtgtaaaggtcagactctggaaatgtgggggagaattagggctggcttagaactggggagactctagtagtcactgaccactctgaagcccaggatctcgaatgtcttgcggatgccaaaattctgatcatgctgggacatgaacctgatgctgagtttgtttttccgagcccgtgttgtgctcgcagggccattggatggctcccttccatcatcactctcgctggatttggactcaactaggatgcacacctctgggcatgtctgtcagggaggggaagacccatgtgggcagcaccatcccctaagctgtgggcagcacctaagctggggactgaataacaaggagaaagagagctgggcaccagcaatctcttctatttctgtttcccgactgtagatgcagtgttactaattgcatcgcattctggcttgctaccctttcctcactcggatgaactgtttctcctcaagccggaagtccacctcaacacttcctcaacttgcctttttttttggtcaagcatttgatcagagtcatgagaacataaaactagcacaagctctcagagtcttttaaaaaatcttatcccctggacagagtcatagaaccaaagggacctaacagcctggagccatgctggaacatgttctagggacctgggacacctaaatcccttgccaacgttgagagcctgtgaggagagactgtgtagaccctgccctacacttatgcccctatcggcaggctgggcagggctctcccaagcacaggggaggcctcaggatgggtggaataagttggtacctccatgcatatacctaggagatgcttctaactgagcaacattctgagaagccagagaatgttcaaacaaacagcattctggctgtgtgtcagggcaggaggagctacacagtggggcccagggctccacgctcctgtgtgttctcttgtctgtgttctgtaaatcttttcattactagaatgaaactcttttcccttggaggtgggcacagctcttgtttcttcttgcccattgttcactgtttttctagacactcatagctggtccttattagagagtatagccaggattagcagagattagtagagacctcgcagctccttcctttcttgaatacttcttttcctctagctcagaggttctcaaccttcctaatgctgcaaccctttaatacagttcctcatgctgtggcgatccaccagccatcaaatgattttcattgctccctcataactctacttttgcttctgttatgaactgcaatgtaaatatctgacttcaacctccagagggggttgggacccacaggttgagaaacattactcgagggccatacatagtcctccatgggcaggaaccatagatctctctgcaaaccaggctggtctcgaactcacagagatcttcctgtctctgtctctcaagttctggggttaaaggtgagcacagctcaagtcctcttgcttgtccaacaagcaattacttactgacctatctctctggcctatgttctttttaagagagtcagcccaggttcaagatcttgtccaccgggaatgaatgagtgttctttctaaggtttcttgctctctgtttatgacaggtgatattgatcctctattagtgatacacaggaatgttaagatttgttttgctggggaaggcatgtgatccatgtatgtatggatcagaagacagcttgggtgagttagttctctccttccactatctaggccctggggatcaaacttagatcatgaggcttggtggcaagctcccaccgagccttcttgtcaacccatgtacacaggttgggtttcggtggtggtggtggtggttggttttgtttttataaaaagtaagtaaaacaacggagcagaaacattcacttataaatacaattggtctttttctacttattaaagtttacctacattatagcatttgcatgcatgttagtgtaaatagtccctagatggggtaggtaccattcataggagacccaggcaggagtctccaaacctgaattccagccacttgggatgagcataatgctgtctttcctggtcactttagagtagcgagttggatatgtttcccattttgaattcagggccctccctctatcacccactgaaaagggacctcaggaccactcctgggtttttcagaactctgcctaagctgctgctgctgcccaacaggtaggtcctacctccaggatgccagcatcctgcccttgggggagggaagagatagaaagagtccctttagctgtcactagggcgcccagtgccacactttgccacaagctgaccctgctggcccaggtgaaaagaggacccagcagtcaccaccttccctctgtgacaccatgcctgcaatgatttgtttgactctgtgtgaaggttttattttggtttctgttgtttttgcagtattgaagacagaacccagggcctggtatatgttaggctagcactctaccactgagctacgtacccagccctgaatctattatttatttatttaattaaaaaaattacttattttatgtatgtgagaacactatagctgtcttcagacacacctgaagagggcatcagatcccattacagatggttgtgagccaccatgtggttgctgggaattgaactcaggacctctggaagagcagtcagtgctcttaatactgagccatctctccaactcctctattttttttatttattgttttgggttatactgtatggaacagagtctcacactataacccaggctggccacagatgcagggacaatcaatcttcttaccttcgttccctgggtgctgggatcataggcaagtattactacacttggtttgtgggttttgttgttgtgtttgtttgttttgtttttgtttgtttttaaactttttattgattctttgtgagtttcccatcatgcaccccagtcctgctcatctccccgttcccttgtatccaccttttgcccttgcaacctcccccgttaaatatatatatatatatatatatatatatatatatatatatatatacatatacacacacacacacacacacaaaaaaaaaacaacaaatacaaagcatagaagacatctcaacatataagctgtattatgtcacagtgtgtcccacagtctacccctctgcccacacatcttctctcaaatgttcattgcaatgagttactgctctggttcgaggtctctggcttctgtgactccatcaatattggatcctcactgggactcctccctgttatcctcttgttgccctgtgtcatggagatcctgccactttggatcagcagagctggccatttcatgcatcccagccctttgcagatgatatagatttggagatggaaccgttcagaaccctggatctggtcagccctccagctctccctcctctgcaccaccagggcgagctctctggtactgctctggctagaccacccaatgccaccatcagcgggaggcaggggcagctcttctccttgcatgccctcggagcccagctcaccagcacccacgcctccagagccagctccactgtgctgtccagtcaaactgcaaggctcactctcccaagtgctgcagcctgtgagaggctgggccagctctcccactctttccacaggctcacctgtgcctttcctatcaggcagggtagagggcctgctctcctgagtgctatagccagtgagggagcagggctaggcatccctgctctcatgaccccagggtcaactctcctggctactgacgatggggagtcacccaccgtaccccacgccaactttgggagagaggctcacctgcgcccccttgaccaagaggtggtgaggggtgggggtgggggtcaggtggggatgggacatcatctttgcatccatgctaccccacggcagacaagtggcaaggtcggttctcttaccttcatgccctcgggccagctcacccacacccctgccaccagggatagctccatcttgctgcctgggtgaggtgcagggctcaggtgctctcccgagtggtgctgccagtgagagatggggccagttctctgcagcactgcatctagtgacgagtggggaccagttatgcagagcccctggacatctgcatggtccctggtggtggtcccgaccagagacatccccatgttttctagtggtaacatgaactacagacattgacaccaactcctgctgggccggattcagatatggccttcacagacagattgggctgggacctgaccgtggacttgggtggaggggctggctgctcacaccaggttactctgctcgacctgcgagtctctggttctgtctctcttcataatgcgcaagcgcaagctgctccatttctctttctctccatctgaccaccgcaaacatgcacattgtggtggttcctgctacaggctggccacatggctggcaggcccctgggtgacatcttccatcagccctgcatggtgtggtacctgtaggtctatggtctgccagtgccaggcgtgggagggcaggtcttcgagtggcgtggtgatccacaggtctctgtctgtcttcctcctcccaagctgcactgcccggattgggttggattggattagatttttttgcatcctaggcataagacaattttggccaccaagccaggtatcaaggtagaatgaacaaaggactgtcatctgctctgtcccctgattgatataagagccataccaccaacaaggtgattctttgcccattgccaagggtgtgtgtgtgtctctgtgtgtgtgcatgtgtgcatatgtatgtgtgtgtgtatagtgggaggttgtgtgtttttattttaaacttttaccatggaaataatgaagcatttacaaaagagaaataggatgctatgataggtttcatgtacctgtgacccagcttcaaccatgttctcttgtgtgtctaacccttgaacccccaacccttgctatagaggtctcctgtttccttctgtaaataatttgctatgtatgccctttgaagagaataagactacaccgggcgtggtggcgcacgccttaaatcccagcacttgggaggcagaggcaggtggatttctgagttcaaggccagcctggtctacaaaatgagttccaggacagctggggctacacagagaaaccctgtctcaaaaaacaaaacaaaacaaaacaaaacaaaacaaaacaaaaagaataaggcctcgtaaagtgtaagctaacatacatgccataaatacatttgtccaaacgcacagaacacataccacccagacataccacccagagtgccagatctgtcagccaccgactatgtgtcaccacagcacggccagatgtggcaaatgtgtcactctgatatcggacatagataggtgggcaccccgggagcatgggtcggggtgggtggcaggtgggagagattgggaagtctgtactttcaattttgctgtaaccctgaaacgactcgaggatttgtccttaaaaaccgaaaagctcaccatactgtcaggaaacttaaaaatgagcaacactttcatgatctatgattagaacgcctgtcttcctcactaagctgggagtgtctccagagttttctgcattgctcttggctgtatccctggacctagcagtgtctgagaaccagtaagtccacaacagtccaggctagggaggtgaatgaatgaatgaatgaatgagcgggtgaggagctgagagcccactctgctctccttgactgctggcctgtcatcacttggctcgaccgctgctcccaggtccccagactctcccattctgagatgagcaggaccagtcccctcttctgcccacctgcatcttaaactctcagcgagtggctaatcctctcccgtggctgcagccagctccccctgtgaggctaattccaccttcccatttaatcatcatacttagcacactcaatgagggtttttcatctccgagccccacgcaggcattagctgattactgtaatctgtttgactcccaaggcatccgccaggaaggcagggaaaaggacccggagcctcctttcccttttggaagctcagtttcctctcctataaacttggggtgtgatggctaatgggcatacggggtggtggggttaaagtcccactgaatctgaaaagggccgggcattgtttcctagcaaccaacaagcccacacctgggttagaatccagctttcaccacttcagattttctgagccttgatttatctataaaacgaagacagtgcctacttctgacattgctaaaaggatgggtggacactcccaccacattctcatgatgcacacactccatgcagggctccagagaagcccagtggccgttcttagggcataaatgaaggtgcaagaggctgaggtgtgtggcaagcagaagttccttctttccacctttgttctctccccagtgttggaaaggaggagagacatccattgcctccctcccgatagtctcggcagctagccctgccttcctgtccccggtgcaccagtaaggacagatattaggtacaagaggacacttagtctagatggggaggtattgatttctgtttgtttttttgaataggatcttatgtagcccaggctggcttcaaactcactacttagccaaggctatccttgatctggtgacacttctgccttcactctccaggcattacaggtgcgtgacagcatttcaggtttatgcggtgctgaggatagaccctggggctttgtatgtgctatgcaagcgctgcacccccaggccaccattgatggaggacatttgggagctttttcttacatccaaggaagagaccatgggtcacacccacatttcacaaatgatgaaactgaccctcacgcagagaaacacaacacctataaagcccgaagccggggctgtccccatgctggtttgcatgtctctgtcagggaggagaggggaacccctgcctcagctgaccctctaatgctccggggagtttgcagttgctgcttcctctctctgggcctggggtgagctggggcgcagggcacctgtttctagttccccagaagtttaattggggtggttatcatcatcttctgtggttgtagactgcagatctgaggagatctgcgcttactgtgtccacaaggcatcagtatgaggtgagaggagagggtaggaggggtaggagccctcccctagacacttcgtgggcctcagtgagagtactgtcctacccaccagggctcttggctggtacggagtccacagccagagtatgggctgtagggattatctggaacattcacagggcactcccaggagccaagctcttctttggttgatggaagagagtaaataactgggtcatcaacccattttccagatgagcaaccgaggcacacagaggttaattaaccttaattgttatggtttcagtttaaagccagacttatctgtcctctcttctacccagtataaccagaggaggagttgaggctcagataaaggcagcaacttgcccagcgtcacacagctgagccacctcagttcctaagccttaggtgattttcagttcatatttagagacagggctagggacacaggcccagtgagtctggaatcaggcaacctggtggtttgggaagagagtgagggacaggtggcactggggacaccagcagggtgtggttttggtccacatttctgtggggttcttgcccgctctccacccagcctggaggggggtgctgtgctgagatccgcctctaggtggtgctctgcactgcagatctggactcccctggggactgggagcctttgtgccctgggtaaccctcatcaggtggcagtatcttctaagtttcccggatgcctctggacagcagcttccccgctttcttccaaagctacttggctttgtcagaaaaagggctggcgggatctggggagattccttagggtgatttgggatcacatgttacttcttggttggtccttggccatggccagcttatacaattaagttttttttttccccccagagttggggattgagcccagagcctaacagcaagctgcaacctcgaccctttttgttgttttgaggtgagacttgctaaggtgcctggggttacttgatggtcttcttgccccagactcttgagtggctgagattacaagcctgtagccccaggctcttggtccgcagccctttcctcgcctgcagagtgcgggtgttttatttctagaacattaggagagtttgatgggatgtccttgtccaaggcaggtacctccagccaggagtggtcaggacgatccccatggacagtggcgggctcttatggcatgtctgcctggatgctggctcttcctgtctatgtttcctcataatggtggtccatgtgtcctcactcatccatcacgcccagcctctcctgctcatcctcatggacctcacactggctcacagaggagagttggtgagggatgactatgagcctcactacctagcctcagactcctaccaaccacttcccagtacctgtagtacatttcctcatgccccatagtgcctgagatgcacctgcccgtggtgcttagcctcctgggggctggttgggagacatgccggagcagctgtggccaggtaagtgggggacagaagaggtgtgtgcacccaacattctaagtaaaccagctgggagcctgtgaatgccttccctcgacctccgccatccctcgcttgcttctgtgtgtctataggtttatggctccaaaatgaagacaccctaggtctttatccttgggagctgtcccgtgaccactggacccccatgggagtaaaaagctaacatctggggctacagaagcctccacttcatttatcttacctacagtccagttaatagccactgggcctcaatgatctcatcagcgaaatggggacagtactataagccacagcatcatagagctgtggagagcttgagtgagcttgttgatgcaaccctcttaaacttctttgagaagattctgagagtatgagatgatttgagacctccctaagcaggaaagacaccgccccccccaaccttccactccatgattcttgatgatgaggaggcttgggtgagtgtgtgacctgcttagggtccttcagacagattgtggcagagtcagactgaattctgttctctgagccacatctagagctccgtagcacgcttcctgttctttacaacctggctaaaatggaagtggctcttctctcaggtggtgtgatgcagtatggcccagaggaggcccagatgtctgctccagggtgtacttttttgtttctgtttttgtttgtgtttttgtgttttgtgtttgctgcactgggggttcaaacccagacctttccatgctcaatgataaagatttatctttctttatctttatcagctcttttaaattttactttgagacgacatcttgataaattatcaaggctagccttgaactcattggcagcccaagctaacttttggatcgtgatcctcctgcctcagcttcttaaatagctgggattacaggtgtgtgctactatactcagcccgctcttcttttataaagggcaattggtttctgtgtgtagttagcgggagactctgagcctacaagagcaggccttgcccagtgtccctcagtccccatgggctctgccttctccctgacctgttgttcattctttggccagctccatacctgagaccaggaaagccatatgggacctggcagatcgatgttttatcctagctgtcctctactagaacacatgcagatgtaacgaggggacaggttcactgtgtgacaatagagacaaagctacaaaacaaaagcaagttctagaatgatgtgtatagtatgactgtatgtattagcagccattccttaacatttcagcacatgctcatgtgtatgtgtgtgtgagtatgagtgtgtaagtgtgtgtgtgtgtgtgtgtgtatgagtatgtgagtgtgtgttatatgagtgtgtgagtatatgagtatgtatgtataagtgtgggtgagtgcatatgagtgtgtatgtgagtgtgtatgagtgtgtataagtgtgtgagtgtatatgagtgcgaatgtgtgtatgagtatgcaagtatatgtgtatgagtgcatatgagtgtgtgtatgagtgcgagtgtatgagagtgtatttgagtgtgtgagtatatatgagtgtgtgtgagtgtatatgagtgtgtgtatgagtgtataagtgtgtatgagtgcatatgagtgtgtgtaattgtgtgtgtgagtgtatatgagtgtgtgtgagtgtatatgagtgtgtgtgagtgtatatgagtaggtgtgagtatataagtgtgtgtatgtaagtgtgtgtatgagtgtgtgtatatgagtttgtgtgagtgtatatgagtaggtgtgagtatttgagtgtgtgtatgtaagtgtgtgtatgagtgtgtgtgagtgtatatgattatgcatgagtgtgtgagtgtgtgtgagtgtttaagcacgatcctgctccccttttgctggttacttagcgatcctttgaattactattccatcagggagggccagagaaaaagagagtccttgagttgctggtgcgatcatgcagtcacctccttaccgacctcttagacaatgcagggactttaaaacaccccaagtcttgcaagctcttcctgactcccgtcctatgatcatgtgaccttaaattcttgatgttaaacattcgttttcctgtcttttacatccaggatcattgtgtttaccagaatttctgtctgcgcactgctcccatttccttcccgaacattcaggcttccatctgggaccactttccttctgcctggagcgtccccgttatgtttattttcaaatctgagctattcatatggtccagaagtcaaaaggacagacgtgcaccatgatcaatgcctccctcccatgcctgctcccagctaaacactgaacatttccatatgcatatagaagattctttagaaaggaacacactcatctgagaacagtggtttgggtgtgtggtctgacaggttggtgtgggaatattttcctgtctcctgagtgtaaagagacaaggagccaggcccaggtctggcagttcagagacctggtcttttctgatccacagcatatcccattctgtccacagtacacagacctctctgtgtcatacccctggggacaggaaggtgcaaagttccccagtcccaagacagctggcagccatggctacagttttaggaacacttgctatgtatgctgaataccactttatagccccagctccctccaccctcacattagcttggctgccatacgccattttacagaatggcagactgagacaaaagagttaagtggagaaggagccagagccatgatggtccactgtggcatggtcgaaaatcaccaaggaaacacgtctctgtgtccatgagggaatttccaggtgaggttaattgaggtaggaggtccactgtaatcgtgaacagcaccatttcatgagctggggtcctgggcagaccaaaacggagagcgagcttagcatgagcactaacctgtctgcttcctgactgcggacgcaccatggccctctgcctccatgttcccacctccatgacttcctcactctggaggactgtatcttcaagccaccacaaggatgaaagaagtactaatatcccctctcccgtaactccaagctatgcagttgtcagctccgttttatagacgaaggcacccaagggttaggctgtgtattcaaagtcagaatcaggggccagcacaagaactcacatccacggctctgagggtccgaatccatccttctcacccccaggggctttcccacggtgggggggcactttcaggagtgtggggaaggcagctcaggatggttggatatgaagttctgctcctatggcaacccctccatcccaccttcaggagtgtctgaggctaataggggggtggggtatctacccataggggaagagcctgaagtcagacagactcagtgctgtataacccagactgtgactcattagctcagtagccttgggcaagctgcctttctatcctccagctgcctcagtttctccacctgtcagtatctttatgtggtaaggactgagcaaatccatgcacagcattgggagctgctctcaatcctagcaacattactgttatttgctgtgtggcttaatatagaacctgtccctctctgggcctccggttcttcacctgtgagtacatcccagggtttggggtggagttcatggccttgagtagggtctttcatttggatgccctgtcagtaattggctggccttctccatccaccctagtcttccatagaacagccttcccctattgcacggaggtgggtgtggccccgggctggcagaattagttccgttgtcatctgtgatgatacctcagagtgagtctggcctgtgttcttggtgttgatgtctctcccagtatgggatgctgggctgggcacagacagacgaggtatcctctagggtagagggatgggaataagggttccagctactcctggcagaggcgtgggtctgggtttcaaggccctctgagaagactcctgtgtgaggcagccaagatggagctgggggccccagatccacttccttcctatgagtgcccgggggcacttggtgccaatcctagccaccaagcgccattccatgcccatgaataattcatggcctcgtgtgccaatccgtgccagctttaattagcttctaactttttgtcattcatttccctatgaacaccttataaataaatgatgggcccgggcccgggaaacaggagcggggaggaatatgggggaaagagcccaactctgaggccacgtaggggatggggagcctccggggctgggcccagggaagcccacacctcaggggcctcccggaggggggcagtgagctgcagctgggtgccccgccctctgtggcaccctcccaaacctgcttctttgagagctgagttgctacagctgcgcccggctctgtgggcccacaaagctagtacaggcacacacgtgtcagttttatggtggcaggggccctccgggagagggacgcagtctagggacccaacaggaagtagcaaatggggccttgccagcggaaggatgacagtgaggtgggcgtcagtgtctgtggtgagggggcaaaggcagtagcgacagaggagggttggctgcgggtgctcacaataatggcggcggccccaagccgaggagaggctgttgcgcgtcgtatttatggagtgctctcgtgtagacttttgctttttacctgaatgacagtctagggtggtggtcagagggactcggggctcctgtgcctgtttactgaggctcaggaaagatggctaaatcccaggcccactgtggtagccagcaggagttgcctcctctagtttgtccctctcctccagagacagctgtgtagtgggaaaggtctttgaaggccaccatgccaaggtccagcctatccagacccaatgaactagacgtttgcaacaacagatctcggccctccttttttcatttcctcctttcttcacttcctccttccagtgtttcttatcctgctgccccctcccttcttctccaccctccctttccttccctctcctcaatctcactgcatccctcttttcttccagccccgcccctagctccacccctgcagtctcatttcctcctcctcccttccagccacgcccccagctccacctctccagtctcatttcctcctccccctcccgccctccccactttggtcccattcccactcatttctctctgccttcccacacctacttcccttccttaggtcatgctgtcatgcctaaggaagaagtgtgagcgagccaactgagctcttggtgtgtccaagaggcaaacacacctcaacaggccagggatggagctccgtggtagttcatggaggtaggatgtaggggccttattttttatctctgataagaagaaaacatgtctagttgggatatgtccctttctccaggaagccagccagagccacccggaactgggcacatttcatcttcccttctccagcccagagtctggctggaagctgctgctggtaggagagatagctacaggatgtttgggcaagatgtccgtgtgtgaggcagctggccacaaaccttttgcctttgcttttctccacctgagttttgaaaacaaagtgaccaggtcactggggccacatttgtcataatcactagaagatattttaatcacactgagtagggtacttgtgcttagtacctctccccagctcccacaaacacctggtgctgcttctggtttcgtcatctacggaacttcgagatgctgccgtactccagggcgaacagctgtcctgtttccccccagggacagcccacatgctcacctccaggcttcacatacaatgttcctgccatctctgcaggctgtactcaatccataatcctcctgcttcagcatcccaagtgctaggattgtaggtgtcaccacatctagctagactcagcttttctcttttacctctggctggaggtttatagcgcttcttactaccatcgagctcaggggcacctccttaaccctttgaatccccagatcgtccattgtgggacagatgctttgagtctgttacacactcgaaactgcaggctgaccacgccctgactttcctggcatagggtgagcatatgagggctgcttgggcaatcaaggtaggtgctgaagaggccctatgagcagaagcaaggtgccaaacttctgagaaggcggtggtttcctggagctctgtcatgtttcattcccatgtaaattggcccaagacagaatgggaagtcacagttgaaaaggatgccacaaagggcttggggtatagctcagtgacagagcacccaccgagcacatgcagggtcttaggttcaatccccagtaccacaaataggttggcaactaaccagaaagctttagtggtggagacctggagaatacgttcattttatgaagaacatgaggtctttgaggtccattgtcccaccacaaagcatccaactgaacagacattggagcccaggtcccctgactcctgacttatctaaagctgagacgccaggatacccaagagcactgtctcagtttagctgcccagtggcctgcctggctcaactctgtcaggtcactgacccttgtgccctctgtagcacattgtgagggggtgggtatggggttctcctgctctcttcttcatagaggctgcctcttgaaagccccctcagaagccagcacccgtcattgttgaccacgccccccttcctccacttgagcttgaggacacctctgtcaatggcctctggcagccttgagatatgagtgagtgtgcatacattggtgtgcacatgcatgcggtttttctcagacacttgagcatctccagtcactgaggtacctttgctcccccctccccctgaggatttggagagtcaggggtttggatttgccagccatgcagcacatagcataaaggaaaccccaaaatacagaggcttgtctgcattgtccttggatgttagtgttaataaaactttatttacaaaaataaggtgacgggacagattgggctggttagcagccatttgatccttgtccaggagcacatggctttacagcatttgacagttattgttattcatgatgatgagggtttgtgcacatgtaccctggtacctgcggatgtcagaggagggcattgggtctcctggaactggatgtcgcaggatggcatccagtgtcggatgtgggtggtggatgctgggaacagaacactggctggtcatctgaaagaggagcagcccggggaaacattatcagtgaagcagttctgtccctgttgcccagcccagggtcccttttcccagctagatcagatcctgccttcccacccccacccctgtccccagggatctgtttgaagtattattactcttaggataaagactaacccctgcctggggatgcagctcagctgcagatcacatgcctagcatgtccaagggctcgatctgcagcacctcagaatgagacctcagatgaaggctagcatgcccaccaaacaccctctaccctcaccatgtgtggtccctcactgacctttatatatacatcagctctttctcaccacagaaactagcacacgctgtctctcctatctaaccttccttctgccttttaccttgccatgtttgtccggctctcttctctttcccaggtgccattgactgactcttctttgcctcacctctgtgttcctgcaaccctgcaggcttatctagcaagcacccagggctgcttcctgggactttctccttgagtctttgagagagtcatggaggtgtcgcgattctggctatattgttacttgtttatatgcttccctgaactggttcctctttagagggtttccctgaggcggagagccatactcagactatttcaggagccaacacatggtagccaataggaatgaacgaacaaatgaacgaacgaatgaatgttaaaagactggagctctagattcacagttactctggtacaattcctgtctccatccctggcaagtcaccgacctccctgaagcagcctctctgccagaaaacctgggttaacctcaggacccagcagaaagctgtgctgaaggtgaaatgagttgaggcctagaccctggctccaggcaagcagtgtcaataagctggccagtagtgggaccagtccatttagctagggaagtaaagtcgcccggtgttccttgttaatctcgttgtccaacagctcgaaggctgtctgctaggctggcaagaaggtggaggaatcttccttcagttgctaccgagggatatcccatgggtctaggtaccgagggatctccagggtgtctttgactcagggccactagtttctagtatcagaggcagcctgggttgcagagtcggaggggcacaggtgggcccacagacttgaggcaggtgaaggcgaagaatggcagcggtggccagtagcgaccggaggaacctttcagcgactccgggagcagaaagggggcgcttaaagccaacagatggcgcggcctcacctaggcggtgcgccttcctgcttcccgagagcgttgcagcctcaggcctcggctcggagcaagcgggaggctgcggttggatcccggacctttgcgagatcacgaacacgcaggaacagctcgggcacgctcccaaggctcgtttttttcccccctgtctccctcctgccccttgagggattccactggctgccatagcagccaatgtcatggcatccgcggccagtgcaggcaccttcccatctgggctccctgctggggtcagggtcactatcggactggcgacggggaacggggtccggggctctgggtgagacgcgcgggcgcgggcgggcggagctcgggcgctgcgaggggagcgcggcgcgtcaggaggcggggactggcgcggggccgcgcggggcggaggagcgagggaaagttgatcgcggacttgagcggcggctgcggctcgaagcaagacacgatgcatggcccgggaacacgtcccacagcagccgagcgctgagctgcgcagcaaagagcgggccccggggatggagcacactagtcctgagtccccgtgtgctccgtgtagggcaagcctcttctgatctcgcggcgcgtctgaagttgcagccagcgagcagtgagcagggatcgggcggccggagtggatcccagagagaccttcgcgccggcagcgagaagcggcggtggccaagactggagcaggtggcccgtgggggcagagccggtggcgagcagatcccgaggcgcggcgcaacgctgctccacctgcgcacacggtaccgagagtccctcgccgcctttctctccccatccccttgccttctcccaagcctagcgcccgctgcgtgccgccaaagttagagccctggggccgcgacctcagccggcaaagccacttgttcccggaacgcggcgagcgcccgggtctcccctctatcccgcgtcccgttccagcccgcggctggacgcgcggcaactttgattcccgggaactccagttccctatgtgttggccttggtgagacgcgcaccacccggagccccgtttcgggaccgcgacattcgcgggcttcgctcttcgtgcagctcagagggtctgggtctagctaggttgagagaggtgttgggaaccatcctgtcccttttgagctcaagggccctttttggagaggggaggtggggtgtggcacctccaccgcaggggtgggcagcggcgctggaagaactgaagtcacgtagttctcatccctgctcaccttcctaggcccacgggagaccccaggggacttctggccacctttccagtagtggtagctctgggtagaagcgtccctagcagcgatgggagccgcatgcctctcgagcttcgctttccgcgccccggggctggccggccttgggtaatgtctactcatctccacagccagccctgggaacactgcccctgttgtcctcgcaggtcaggctgggtttcgtgcagatcccgcgcattctagggtggtggcgaggcatccgcccggcattcattccttcttgcccagagcgagaacagagaaccagtacctccgcgagaggcaagtggagatcctgtgcccttggccactgcgaccctgggccgcctcccgccccccacctctccggccctggcgtggtcacaccttggttagaaattagccttgcaggagtagtaacacgcccacgcgtcccagaaagcggacacgcccattctgcacacttggtcctctcatccagaacagaccttggcccttatccgccccccgccatgcagccccttagcaaacgcctgctgccccaatctgggttttttgaaataacctgaagggacaagaggattatttgcggggactgcacgagccagattcttgcccggagaagaatcacgctgggagtgggggtgggcttgtggcacacggttggggccaggtgcgaggtggtgatgagtcagcccacggtggcagaagctgctgggagaaacgaacgcttggctcctggtgcaggggtaggcgcaatgcggccagcacctatgggggtggtaggaccagatgtcactgccaaggaggggtgggcaagggacaccttggccgtgggaatagaagaggcctgcctgtcacacagagagatagagcacgcggtgtctgcaaaggcactactaagccactagtgtgaacagagcttttacccaggtgctggaggcaagcatttgagggtggtaccctggccctggctgcacccccatagtcacgtctgtctctgccttccccagctctgtcaattgggcccgtcacagctgctcaatagatggcctgcagggaggttatggccacagagagttggggttctctctctgttagcaccccttccccacaagccaccttgcctgtcatgccatcagatgcgcttcatttcttccaattcactattacaaaggctactttgccaaagtgtatgtagattcaaaacgcctcacctaggaggtgaaggcctaggagaatcttggaacccaagggtggcctgtggtgtagaacctgtactgggggtggggggaccctgttcgaaatgcagatcctctgcaccccagcccaacctccaacagatcaaggccttgtatcctctaagattctccagcacttggcaggctgctaagtttgtgctgtggtacacagaaccttccaggacattggaataaaatgtggatgaagctctgccctggataccgatgttagggttgggcagcccctggggctgtacctttggatgtcacaagagtgtctgcatttggccagctttgaacagatatagagggcagtctgtctttctgtgcagcgtaatatattgctctgtttgctgcggccaggaggaggtgggcagttttctggaaactggatgcacaggccccacctccaagattctgggatgggtgggcgctgtccttaggcaaaagaacctgggcgaccgtctccaatctcagctggcccactggagatgcttctcagtgagtggccacagagaaggggctgcttaagagcccactgtgggacgcatagggagggaaggatgcagacgaggctctgcctccagcagcctttgacctaccacttctaccgccctaggagaggtctctagcactaagctgggaggctgggggtgagcatggcagcctgtgctttcgagcctgtgcccccaaagctggctgaagctgaggtcaaaggcctggccggggcaatggtgtcacaggtctttgccaggatgagtgcaactctgccatttggtagggtggcttggtggtcaccaactggcagagtcataggtcttatagggcaggatgattcccggtgatgctggtgctgatgctggtgttggtggttcccattccatctcaaatccagctgattccagccagtctagcgtaatggtctcacaatattcttgggctgttgggttgaagagaccccatgttctcccatataaaggcagttttataaatgaactcagctgcctttgaactggtttatttcttattcagttataggggcttgaagcactttttttttaaaacccttgcaatctggttcctcttggtgctaggtcctatttgtcctttagtagctgagcaaggtcaaggtggacctccccaagggatgggataattcaggatgggagtatttggcccctggtggatgaggccatgcttccacaggtcaggtgggtgattctgacgctgcaggtgcctcctagtccggaagtcttcctggcttggtgtggagctatgagtgggggctaggctgcctctccaggcctcctcttcnnnnnnnnnnnnnnnnnnnnnnnnnnnnnnnnnnnnnnnnnnnnnnnnnnnnnnnnnnnnnnnnnnnnnnnnnnnnnnnnnnnnnnnnnnnnnnnnnnnnnnnnnnnnnnnnnnnnnnnnnnnnnnnntccctccctccctgtcctccatcccccacttctctcttttctgtttcttcatccctcccttttctcttgccatctttcccactggtctgcatgactctgacatcttgctctgtgacagcccatgccttgtctttcctctgtggcccctgccccctggtatgcccctccatcctccccacccccagtgccttccatggctactgctcaggtgctgaacggccagtggtatgatttgcattcactgtgtgctggcttcactgatgtccttcagttgtctctcacctttagtgtttgctgggcccccagctgggtttggctgttcatggtagtagctcttttggggatgggtggctagtgctccccaactgctgaccagattgcacactttaaaggtctaggatgtagagtagcatgggggacagggcttggtgttacaaatggctgcaagcccagttcttgggaggctgaggcaggaagattacaagtttgaggccagagtgggctacatgcatagaaagttcccttttcgagcaaacaaagccagggggctggcgggatggctcagaagataaaggtgattgctgccaagtgtgctggaacccacaaggaagaaggagagacacccccccacacacacacactcatgaaagttgctgcctgagtgcccaagtgtgaacacacatgcacactaaataaatgtaaaaacatttaaaaatacacttaaaaaacaaataaagcaaggacaaatatgagacaatagggagaggtggggtctgaagagcacagggatcatcaaaaaagagcagctagctgaagatgtagcccagttggtagagtgcttgcccagggagcaggagacttggtttgatccccagcggtttgatccccagcagttggctgtgtggtgcacacctgtaagcccagccctcaggaggtaaaggcaggacaatcaggagttcaaggttatcatcctccactatgtaggagtttgaggtcagctgggctacatgatactttgtctcaaaaaaaaaaaaaaaaaggagaaaaaaggagccgccaggcaagaggcaactatataatgaagtcagaataacggcttaccatgaccccaggtgaaccttaggaactggaaatttctagaacttggtcagaaagtctgcagcagtgatgaattttgtgtgtgtgtgtgtgtgtgtgtgtgtgcatgcacacacaaaaaagacaattcagaaaatgtgagaatgtttatggaccatcttcatttggatttgctatggcagcagctttatggagttgcacaggaaggaaaatgcacacacttctgccctaatacccacacccaactctccccatcttcccccccacccccgcccctggtgtcagtaagagactgtcgtatttaagaagtagccactgggagccggcttctaggctttcactatggaatctgatctggctcagccttgtggagtgagtggagtgggcactgtggctccttgtcattttctccctttgctcctgggcttactgttgctcacttagtaagaggcatgtggccttgggtggtactgctcagctcaagactggcattcatatttgtgtgtattttgaaccctgctcaagtgtgggctgggatggcgatgatgataataacgtacagcctgcatgagttttagggactaagcagaaacagtattgtgccccctgggttctgaagggcctgctcaggccttggttttctcatctgtagaatgggaataatctccagcttcctgtagacttgctgtgagaatcaacaaggtgcaaactatgagaagcctggcctctgatgtacatgggaaaatcaggttttttaagccttggcctttttaagacttgactttgggtgagaggtgagctgaccccttgacttctacagcttgatgacctgaggggttcatgaattgagttgtgcctctctctctgtgtgtgtgtgtgtgtgtgtgtgtgtgtgtgtgatcctaggtttttcactttttttcacttacacttttttttttgttgttttttgttttggttttttgagacagagtttctctgtgtagccctggctgtcctggaactcactctgtagaccaggctggcctccaactcagaaatctgcctgcctctgcctcctgagtgctggaattaaaggcgtgcaccaccaccgcccagcggacttacactcctaaagttagatcctgtagtttcacaagaacatctagacctttggccatctgattaggactggtaacattgtgtctgtgtgtatagctaaagagaacgggtagaagctgagagttgtctctgactgcagtccccagaccgctgctctgaaactatgtagcccaggctggccttgagcatctaatcctcccatcaccaccttttattgtttgtttgttttgttttgtttttttttggattttgttgttgttgttgttgttcgagacagggtttctctgtatagccttggctgtcctggaactcactttgtagaccaggctggcatcgaactcagaaatctgcctgcctctgcctcctaagtgctggaattaaaggcgtgcaccaccacgcccagctctccatctccgcctttttttactgctggagttacagtggtcctgccatgccctgcttcactgaacagctctttcagggcagaatctctgcttggagttaagcctatctgaaagaatgctggcatctttcatgggtggtctatgaactacccggatggacgtctaatgtgtacagggtccctcccacccctcccagcctgctctgtccccttctgaaagtcccaaaccctgcgacttcaccctgggtctgcagctccctattaaatgggactgagtctgcagctctcagcttcccacaatgcctgcgacctcccgaccactttttgtggcctggactgaagagcagaggcatcctgggcacctgcctgtcctgccattttagagatgggagactgaggcctgaggtcaagcagtcagattaaacaaggcatttacatgaagctggccttagccagtgaccaactgagggccgagccggcttctctcacactagtgggtcattcatcacagccccccagagcttctcacacagcattttgggagcctggggctatctcaatactcccgttctggctgctactcctcctgctccctggctgctggggctggctattaactctacttcctccctgcttaaaggccatcttccatttggagaggaactgagatgccatttgtgacaaggacctgcgcacgcaccaccttgattgtctgtttctcaaagaaccctgtgatttgggagctaatgaaagatagagagagagaagagggtagaggaaggcaggggaggggagcagagagaggaaacaaaggggacagcggggaccctgcctggctctacctgtatcgccagggatgtggactttgcctgttagaaggccctgtccttctctgagcacagcccaagtctaatggtgtcttttaaattatctatgttttttgttctttgcctgcagagagagaggtggtatccatccagccccaggcttgcctaggtcttcatctggcacccccagggtgccccgactctgggaagttggtacctcccctctttacggtggccaggagaattctgagaccattttcagggagtcagtagtgcaagactctgagacccctttctttgccctgctgtgggctctgggctgtgtcttagtaaaaggtgcagttgaggggtggggaagctgtacctagaaggccaggggggagcttccaggctgtcctctggagttctgtaggcctccatccccatggttgggaggtatccacgtagctctacctcattccaagcacgtaccagctcaatatcacttaactgaacacccacagaatcctttgcctgacagaaaaatagcccaggacacactcaggtagcactgtccactaaccactctgatggcaaaattaaaaagaaggcgggtagggatgtgcctcagtggatagaatgtggtgttctaccctcagagccatatcatccaggcttggtggctcatacctgcagtctcagcactgggggagggaggcaggaagatcccaagttcaagaacaacttcagcttccaaaaaaagggggggtgggaaagaaagaaagaaaaaaaaaacctggcatttttgctagtgaattttatgactacacaaccctggatgttaccggttcaacatataatcaccatgtcaaccttgtgataatctcttgtcatgggacgactgtgaatggcgtcaacagcacatctcaggatgggaacttgagtgctggctttctagtggcatcctgtccccagtaactcttaagcacgccaagaaagcagcacttctctgtggcctctggtctttagttcctgccttgacttaccttcagctgtaagacggaatagacctctccttcccaagttgcttttgatcatggcgtttgtcacagcagtagagagcaagctgagttctccaagaagggtattgggtggcttggaagctgagcagttgggggaagcatggagcattgggggctggggggaacctgttctctcaggcagaggtctgttatgtcatggtttaagtgctgaggtgtcttgggggggcacttagcagaacatagggccctttccctctttttctcctggacttggggtggaataggtcttggggttctagagaagccattgcatgcagatgcacaaggccaggtaaatggcagctctccctgcctgcggcttcttgtatgttcagcactggcctaagggggcagccttcaggggcacacaggatctaggatgctggacaggtgtagggcatctctacgagctcaccttgctgaaaagtagtgttactgctgccgtctgcctctgttgctaagcagatggcagagcatctctgaggctgttgggacccttacattcttccagaggataaaaaaacaaaaacaaaacctaacttttaaaaaaataataaaacttcccgattgtgagtgctaccaagtagttaaaaagtattttaaacaccacaaggtcatttattcatttggcacatgcttaatgaacccaggctgggtggcacgtgcagttctagcccccgtgagattctgtggttcctactctaggggaacaaatatcataggcctatgagtggccagtttgtgacctgtgacatggacttctagggtgtctgagctggtgctaatgagaagaaacatttattaggcactaactgtgtgccaggtccaaaacttagcctcagttgcaccttataacaaccctagggcataagacctacagaactatcatctattttccacagatgagagaggggatgcacagagaggttgtgcactttgtccagagtcacacagctagcaggtacagaggcagacttgagccaaggctctgaaactccttactcatgaccattattgaaagaagagtgaagtccctgtctaagcaggtagaagtagataagaacagagagaagacccatactggggccacagagggctgcagctggtgtctggactacccactttcctgtcatcaagctgaggtgggatatttagacatctccagtatctgcagaggatttaagagagctaagagggggagtggcccagatagccttagggatgagccaggtggccatctcagcatctcagtatctcagaggtcacagacagggtcacctcctcgtggcacctcggagctatctgtatgttgagggtctgagcaggagctgctgggattcagtatccaccctggcctctgtgtggcaggctggcccacagctccctcagtactcatggctatgttggttcatccacgagatgtcctcaggctgcttagtgtgccacagaagcctggtgggtggcatgatggtatgggcaggtgcagagtaacttggagccagtgatggtgaggaaagcatacccctcccccatccagacatgctgagatattagagacaggcctgctgctgaccctccccgccccccaacttaaatcttaggacccccactactcatctgttaagctggaagaaaccaaaccctaaaatctgcaagtggctaaccctcctgacctggggaccaagactctcacaagacacacaactgtgtgtgacagaaccagtggtgacttgtgcaacccttgctaggtcaatccatcatttttattgattccccaccaattcagtgacgtaagcaatatgcaaccagcagtctcagcccagtcacctcccgacccaaagaacagtgtcttcccaaaggctctgaccctttatgccctcgctcattttgacaaccatcttcccccaaaggcatctatggcagcaaatatttattaagcaccacatgtttgcaggaaaccacacacacacacacacacacacacacacacgcacacacacaataggggtgggccaggcatgctggtttacatctataaccccagcataggatcgcaaattcagggccagccagggttacaggaaagatcctgtttaaaaaacaaacaagcaaatcaacaaaagtaacagaaatagacacactagtgccctggcctcggaacttaattggaatcttgttttggggacagctctctctgcctctctctctgcatgtatgtatggcatagttcttttttagcgtcctgtgtctgactcagctaaaagtacccactttgtccttctctcttggccccagagctcccacctcacctggtgtccaggaagctgttaggggaagggaaggacagggtgtgaggtgtgaaggccggatgctaccgtaagctagaccagcatggctgacctgccaagctaggtccacattgcctgagggctattggaaactggagcttggccggaagaggggagcccatgaataatacagcgggagggaaggttgttatctaggtgacctggttgcacctgcgcgcttcacagcttccctgggagccacggtgtagggccggggtgtcagaggcaaggcagagatcttggggaaggcaggacaaatgcccttcttccaagtgtgttagctttttcagagcccttttctctggcgttggccctgtgcttgcctctgtgtgtgtgtttgtgtgtgtgtgtgtgtgtgtgtgtgtgtgtgtgtgtgtgtgtgtgtatgtgtgtgtttgcgcacaagtgtgtgcattggcccaggtttttttttttttttttggctgaaatgcctggactgggaccagttgctctggaatccctttttgcttctgttctcagtcctgtcagtagcagggtctgaacttggggaaactctgacgccctcatccccagatttggcaagggacatctttccacacctccataacatctcagcctgcatcgctaggtttaggacgaagccccactgactagggcctaccttatggcctctcatctcagaactaggcctttaagggatgggacagctctgatggtcagcttgagagcaacagccgctgcttggctcgggtgagtatgaacgggcatcgtgtacccagttttatctgtgtgcccttctaaacaaggggactgtgtcattctagaagccagcctccctaaattcagtcctcgctcatccactgtgagctaccaggcaagttcgccaagtgctctgttctgttttctggtctgaaaaatggaaacaccagcacccgattcagagaattcttgggaggataaaattatgcaaaaataaaagatgcttagaaagagtgcctgccacagagatctttgaacatatgctaagtttattctcatgatactgggctctgaggtgccacaagtttgcatgccgcctgggactcctgggtcctttttacccaagacaaaatctctacagattgttccagagagggagacccaaatggaggaaagctcgataattcatttggtgagtggccagcgggaagacagggcgtgtctgtgattattgatgttggtgccaagtgaaccaggactttcccagtttcttaactgatgtgtactatacagaaaagtgtgatacatgtacagtctgagctccacaaagcaaccaattcctcatcagcaccactcagaccaaagaatctcatcactaaaagtcatttccccaccatccctccaaggccacacctatgctgacttctaacgccacattcgttctgacttcgtttttgatggtgctggatttggaccgagggccccactgaaagcaagctctcccacatagctacagctcaacttatcttcaaacttagataagcatgcagtgtgctggctctggggttctaatgcacaactacacttgctgtgagattgctcttgcatgtctcagcccgcttcaatttctctgcaatatgaccaagatataatttgacattccagtgtggatgcccaacgatttgaaactgagctatcacacaaaaaaagaaaccgtgtgaacattcatgtgcatgtgtcttttggcacagacacgtgcatgttcagttttctgagtatgtcactgcccttgagtcggtaccaacccatggcttggctttgacagttctctagtcattcacttggtacttcagttttatttctctttaaaactgttttttttttaatttttggctctgtgcgtttccatataactattagaatcagcttttgaacattccccaaaagccctgctgagattctgattgcaatcgcatcgaggaaaatcgacgtctttgcaatattgagttttccaatccattaacaagactcaccttgccatttatccatgtcctaatacatttctttcaggaatgaatttaggagtttgtagcatctcttatttcttttataaggctttttttctatgtgttctatgtttttaaatactattacaagtgatacttctcatatcaaaccacctatttgtcatagaagtataattgattaaaaaatactggcccatatcttcaaaattttattactaagtttgttactaaaattttgtttctttactaattctgacagtttatttacagacttttaaaaaccatttaggacacatgaccatgctttctacagatataagatttttatatcatgctcttggagacttttttcttttcttgtcttattgcgatggcaaaggctttcagcctaaggtaggatggctgtggtagagagacttttttcagtttgcttctggtaccaaagacaaagctggagctgcttgcttctgtgggtttgctgtggcgtttttgttgatgccagttataacattttcttctaatcccctcttccaagttatggtaaaatgtgtataataacataaaattcgccacttagctctcagagagatggctcagtagttaagagtacttgctgctcttgcagaggacctgaatttggttcccagattagtcaggaggtcacaacttcctgtaactccagttccaggggatctgacatctgctgccggcctccttgggcactgtatgtatgtgtgcacacccatacacagacacacatgattaaaaataaaagcttggaaatattgccacttaaatggtgttgaagcttacagctcagcggtggtgagaaccttgcggctggggagctgtgtggctcaccatctccacaactgtctcaccatgctagacagaagctccgttcctattcccaactaagtccccattccttccctcttctatgcctggtagcatccaccttacttcttgttgccatgactcacggtgtcttgtgtgttcggtttttttcattgactcatgctttctaagttctgaacacaattccttcttatggtcaagtaagaaggcgaggacacaccatgttctgtttactgttcaggcacggctgggtgttcagatggtctctgacctctgcaaatgctgctgtgaacattggtgtgcacatattatttgggttgacgctctcggtatacacgtaggagtagagttctgttgagccttttgaggtcccagcatcgttttccacagatgttgtacccttttatatctccctccccaagcaatcctactcagtgatcttaccaacagttggtgttttctgatagtaggcgtatcctgctgatgttgccccatggctttgactgatatcccctcaatatcggctgtttgtgcctccctttgtgggaactggacatttgtgcttcccgtccagttttgaattgagtcgtttgttgcttttgagttgtagaatctttttgaattccagtacttaatctcttattagatagatgagttaacatttccctattttgagggttccctttcactcagtggtgaggatcctttgatgcacagagatttttagtccaataaagtctaaatatctttcttgctgggcagtggtggtacacacctttaatcccagtgcttaagaggcagaagcatgcagatctcagagtttgagggcatcctgatctacagagcaaatttctaggacagctagggctacctacacagggaatttgtgtttcaaaaattaaataaaaataaatatcttccttgatctatcattgtctggggtttagtgtcatatcaagaagtcactactgtgtccaatgccatgaggatttcccatgtgtacttccaggaagtttagagatttggttcttgtgatggctattcttagctggcaacttgatgacatctggagttaactaaaacccaatcagccgggaatgcctgtgagaaattcttttcttaagtcatttgaagggggaagacccacttttagtctagatcttttgaggtgggaagatacacttttcatccagatcttttgaggtaggaagatccatctttagtctgggccacgccttctggtggcagcctatacaaaggacacggcaggaggaagcacttgctctcggcctgcttgcttttgcctttgctgctgagtccatttcttcactggcattggagcatcctttgacaaatactgaagaccagctgagacatccagcctcgtggactgaacaactactggattcttggaccttctgttggtagacagccattgttggactagttggatcacagtctgtgagtctgcctatcaatcaatcaatcgatcatttacctgtctgtctatctttattctgttcctcttgagtatcccaacacagctcataagtttgtttctctctctgtcccattttgagttcagttttgcacatggttaggtagagttagtttgattctcctgcatgtgaccagttttctctgctctatctgccctttctcctgtcttggtgccttccataaaaccagcttactctgtgtgatggttcgtttctggactccattctattccataggtttgtgtgcctttccttctgtcagtaccacacgcttcgattactgtagctttgtactcagctttaaagttgggatggatggtcttaactacatagggaattcttcttcttttgttttttgttttgtttgtttgtttgtttgtttgtttttcgagacagggtttctctgtatagccctggctgtcctggaactcactttgtagaccaggctggcctcaaactcagaaatccgcctgcctctgcctcccaagtgctgggattaaaggcgcgcaccaccacacccggctctacacaggagattctttgagattctgcctagaatcttgtgatggatttttcaacttctgtgaatagcagcactggggtgttcctttgtaacatggtctcactatgtagccaaggctgaccttatatggtcctcctgcctctgccttctgtctatgggggattacaggtatgggctaccatgtctactccccactgggattttgatggcactgcattcagtgggcagattgttttaggggatactgactatatcctgacagcactgagctcttggggttagcgtggatagctttataccaatttatcctcttcctttagtctcttcccacaggtgttttacagctgttggtgtccatatttgtccaagttagacttctaagtgtcccctcctttttggtgctaccatgaatgggattgccttttctacttctctttcggatttcttttgttgtctgtctcagaagtacagctaattatttatgtgctgttttgaatcctgcaacttcaccgaatgtgtttattcgttctgccagactttcataagctcgtaggtcacacagctcggcttctgtcgcatctgcactgttgtcactttacttctttgcttcgaattttaattttttttcttaaaattttctctttgttgtccagttgcattacctagagctttgaaaacacgacgttttgtatttatgtgtatgtgtgcttgtctatgtgcaagtgggggccttggaagctgttgggtcctctggagttggaattccaggtggctgtaaggtgcctgatgtgagtactgagaactgaactcgggtcctctgtaagagcaagtgctcctacaaactgagccatctctcctgccttttcctgggagcctttaatgggtctgcagaatggaagtgtcagtagcaggtatctttactttgttcccacagtcaggagaagcgctcagtcattcgctcttgaatacaacattagttaaagataattcccatgggccgcatcttctgtttcttttgctcagaactgttcatttgttttgtttttgagttagggtcttactatgtaactctggctgttttggaactcagtacataaaccaggatggtcttgaactcacagaaattcaactgcctctgcctcctgagttctgggattagagatgtgcaccaccacacctggctttgtatgtattcatacactaatataaaatttcttctttctgctggcagtgtagagaattataatgttggatttttcagacattaacatatctttcattcctggaatacatgcagagacacatacacacatgcacatccacagagatacccaacatacagacacacacgcatacatgcacacaaacgcacatgcacacatatgcacatgcgcacacactcgtatacacccatttgcacacatgcatgcatacaagtatatacatacatgcacacacatacacatatgcacacatgtgtgcatgcacatacatgcacacttttgcagcttctccctgacacccaccagctccagaagttttgttctgcatgactgtggttggctgtgtggggtgtgattttattttcacagtggctccaggacttccctttcttgtgacctgactttccttatcagatcacagttaaattctgctggcttttgatccaccagagaccgttcctgttttttcctgttttcctggagactctgggaaggtttgtgctctgtgttctccttgcccattgagcggttcagctgtgcgggctcgggcttcttggtgggaaggtcatgaactgtcgtttccgattcctagagtcatggggctgtgctagtgttctgtatgtcagtttacgtaaattgtagtttatgagggctttatcatttgctacttttcaagtcagtcgacaacaaatctacctccttggcctcttatttaactttattgattgattcagtgtaaacacatgtgtgtatgagcatgtgagtgtgcatgcatgtgtgtgtgtgtgcccgcgcgcacgcgtgggtgggtgcgtgggtgtctgtccgtgcatgcctctatgtggctgaggagatcagagagcagcttctctccttctaccctgtggattcaggaaatcaactctcgttcattttttgtgtgtatgtatgtctgtgcactgtgtgcatgcctggtgtctgcagaggccatcagagggtgtttgagctcctggaacttcctagaacttctttctaaggctctgagtggagtagagagtcgtgggcaggcttccccggggcccccctttccctgcatctgtgcaagtccaagatttggactcctgacctgcgggtggatatggccagaattatatcgtccttatcaggtggtcctgagaactaacagtacaagaatgctgccatgctgagtatgtattcaagaaaggacagttgctaccaatgttattatccccaccatccctactaccaccatcaccaccaccaccaccaccaccaccaccaccaccaccaccaccaccaccatcattaccacctccacccccgacactgccattatcactactttggcctttctggttatagaattaataagagtctttcagggcgttgggagccctgggggagcttgtgaggctctggactcttgtgccccgaccttccttgcccatcagtcacgctcactcccactattctcttccccacttccttctctgaggaggtcccagggttgcttctgcttccagggtgtgcatgctggatgacaatgcagtgacctcgatcatgaagaggcaactttggcagcttcttgctgcacctcttgctgtcactcatgactgtacccttcccaagcagggccacccaggaaatggctctaggacagcttcccaggcatttaatgtgagtatcagtgtttgtggaatatgtggaccaagaggtggccatgataaatgtgtggagtccccagtcagggacctggcaaggcagggctcttcccattagagcaggacccgcagcttaggtgtgtctgaggtccagctggcccattagggagtggcagtgcatgtcacctccaaacacatgagctgtgtgtccttgagcaggcacctgggactaaggtcatacacaaacagcccttgcagggaccccggactcagaagggacagctgtgaacggctgtatctcaaacacctcaagtgccactggggggtggaagtcccttctgctcaccaggccacaggaagtccctccccatgccccacccatcaggccacaggaagtccctccccatgtcccacccaccaggccacaggaagtccctcctgcccatcaggccacaagaagtccctcccacccacctggccacaggaccagtattcccagtgttgactgggccgcaacccatctgcttttgactgggactcagagagtttgttgagtgattgagtgacttgctctaagaggtgggagttaatggtgtgactgtggagaaacgcctagaagacagaatgggatcgatcgcttaggagaggaaataggtcatgtggggcagagggtgtcccttttgagacaccaaattacctattttaaaaatttattcatttatttttatttatttaaaatttatttatttatttatcaaattacatattttattgttcaagtttatttacttactgtgtgtgctgcatgcccctctttctgtgctgttggatagctccctaattactcttttttttgcgtgtatgcccatgtggtggtgtgtatgtgtgtgtgtgtggtgtgttgtgcttaagtgcgagtgtgtgtgtaggtgtgtgcatttgtgtgtggtgtgtgtatatgtgtgcgtgtgtgatatgagtgtgatatgtgtgtgcatgggtgtgtatagatgtgtgtacacatgtgtgatgtgtgtgcatgtgcgtgtgtgtctgtgcatatgtgtgtttgtgtgtgttgtgtttgtgtgcgagtgtgtgtgtgtaggtatgtgcatttgtgtgtggtgtgtgtgtatatgtgtgcatgtgtgatatgtgtgtgtatgtgtgtgtgtgtgtatataggtgtgtgtacacaggtgtgatgtgtgtgtgtacacgtgtgcatgcacacagcactcctgtaggtactagcaggtctttgtggtccccttttccttattctgctgaggcagtgtctctgcctgaacctggaacttctgacagttggtcagccatcctgctccagtaatctggcgtctgtctgcctggtgctgctgggtgtgctaagactgtgccttcttgtcctgtgggcactggggtcaaaccccatgctatacaagtgccactctagccctcttcaccttctgttcggggacagggtctctctgtggacttggttgctagctggccagcgagctccaggattcaccacatgggaagcttctatggcagatgctgggatttgaacttgggtcctcacccctgggtgggaggcaccttaccaactgagcaatctcctcaacccttaaatttatttctgaacattgaatggggcacatgtaaaacttgaaagtccccaaaaggtatctagagagacaccagccatggcttctcaaattctctccactaacatgtgtgtgcacacactcaagtgatgacgacaatgatgaccatgatggtgatggtgacaatgtttaactgcaactgatgatagtagtgatgatgacagtggtcatgatgatgatggtgataatggtggtggtggtgatgatggcagttatggccacaatcatgacgacgatgatggtgacgatcatgctggccacagtgatgatggcgcatgacaacagtaatggtgacgatgatagtggcaatgacaaagatgacaggagtgatgatgtccaatgatgttagcagtgatgatgacagaattaggacaaaggtgatcatggccaaccacttctagtgcctgatgtgagcttgctcacatgaggccttgtttgccccccccctcccaacaaccctcatctatttcagagacgagggaaactgaggcacagaacaatacaggtgcccgttcaggtccacacacctgagcaaataggatgtgtacctgtggtgtggctctttatctcaggaccttttgctctctgtagttcttggtagagcatcaagctagccagggtggggctgactcacatcctgggagacattcaaagagatgatcgccaaggctctcctagacagctctgtccctgtctatggtttctgcttctccctgcctggggctcaacttttcctctctctgtaggagcctctggatcctcatctgttcctgctggcccagcaggaatcctttcagcaccttgtgagcaaagtaggcctgcccagcctccctccttacggggacagtggtgagcgcagagtgggacaccacttagctgcatagtagttctgtccagccaagagctgtctatcgtgtccttgcctggtcccctgccccgctgcctcttcacagtcgtttcttcctgcctccattcttcccactccccaagctcagcttgaggagcacctttaagcctggggatgtgggtgggggcacatggggaaaagccaagtaaaattcctcactgggaacaaatctcattttccagaaagtcttgacaaaatgaggcattaaattacaatattttggagagcgtcgtaattctactgcagacagcccttcatcatggcatctgaaagctgagaaaatacaaaactcattagattaaaataaaccacctactgctcaggagaaaagcttatttatcaatatcaatttacttatgattacgctggcccgcaatttgttatttttaggaattatgatttgtgtattgcttatacacatgtgaaaaaaatttttttaaattgagcatttaaaaaaaaaagatatccttgtccttagcaaaggttagaaagtgatttcagcgtggcagggagagagtcataaatataaagagacaggaggcgggtggcataacacggtgagctgtgtggtgctggtgtgactcccctcatggaccttcagctacatctgtatacctctcaggacgggaggctcactacctactaggaatataccccatcctttggatatttaagctatttaagatgcctttcctctgaatgactcaaaggctgctttacaaaaccaactgttgcacagaactcctggctgattcccaggctccagcccattccggcagagctctgtcttagcacctgtgaaatgggcataccgtctttgtaccccaatgacccctggggtagcagcatgagaagtactcatgttacaggtgtgttgttttccttttttttttgccgtaacatacacataacataaatttggccatttgggtcattttaagggcatggttctgtggcaccgaatgccattggacagcatcaaggaatctaccttctagaactgtctaccatgtgcaactgaaaccgtgcaccattcggcgctccccagcacctgataccacccttgaactttctatgaacttgatcagctcaagtagctcatatgagaggggtcctaacatctccctcattccccttagtcaatgtcttagactcctccctgcttagtgtgggccagactttcctacagttttgatcatggttgtcaaccttccaaaggctgcgaccctttaatacggtgcctcaggttgtggtgaccaccaattacaaaattattttgttgctactagttttgctagtgttatgaattgtaatgtaaatctctgatatgtgatcgcctttgaggttttgtaaagcatcctttgagtcattcagaggaaaggcatcttaaatagcttaaatatccaaaggatggggtatattcctagtaggtagtgagcctcctgtcctgagaggtatacagatgtggctgaaggtccacaagttgagaactgctactttagattaaaaaaaaattattgtgggtgtacatgtgacagagcactcagacattaaataaattaatgttggggctggagagatggctcagcaggttaagagcactgactgctcttccagaggacccgggttcaatacccagcatgggagctcacaactgtctgtaactccaagacctgccaccctcacacagacatacatgcaggcaaaacatcaatgaatataaaataaaaataaaataaaatttaaaaactatgatatgtgtatgcatcatacatgtgtgtgcatgatacatgcgtgtgtgccacacgtgtgtaccatagcacatgtgcagaggtcagaggacaactttgtgaagttgattccccccatctacctttacatggtgttctggctggttctgtgtcaacttgacacagctggagttatcacagagaaaggagcctcccttgaggaaatgcctccatcagatccagctgtaaggcattttctcaagggagaaattagtgatcaaggggtggaaggcccattgtgggtggtgccatctctgggctggtagtcttgggttctataagaaagcaagccaggggaagcaagctagtaagtaacttccctccatggcctctgcatcagttcctgctttctgacctgcttgagttccagtcctgacttcctttggtgatgaacagcagtatggaagtgtaagctgaataaaccctttcctccccaacttgtttcttggttatgatgtttgtgcaggaatagaaaccctgactaagacacatgggctccagggatggaacttgggttgttaggattgttcagtaagcacccttaccatctagttgacccagatttccctacctttaagggtgaaggttcctccactgtgtgaatgtgctaggttttgcttatccatttggtcaagagcagttggtgtttggtaggtccaaccttttgcctatcaaagtcatactgttctgaaaactggtgtacaaatatccctctacgtttgggaccaagagtctgactagccacagtgatggctaagagaggaacggagcttggtgagttgaaggcaggaatctgataattcaagggaaggaggaacacacttctgactggaagtgtggaagctgttcactgactgactgactgcatggatggagatacattttctcagatgagaaaggcaaagacaggagcctcagagaagagacaagattgctgtgtcttccaatgggaacccatgctcgtgggcagagatgctgcttgtaggacgaggagggtctgctggcacaatggccctgggttgctccctcatcccatgctgggacagatgcctgcaatgatgtagggaaggaggagggatgctaaggacacccttccaggaggattcaggatggtgccacgtggcaccagggctgtgcctggagagcagggctggacacgtgaggtgaggcccgcggtgctccgaggagaggagcccagaccagcacactggtgactggcatgggaggtgtcagcaaggcgccatgcctggccagactctgcagcctgctcatcttggctgaagcatgggagaggaagaggttgggttcgaatagcttggttttgctcttataacttgatgatggctgtcaggagcctctggtatctttctagaataggcagaaagagcaacggccttgtggtgtcctgactaggactgtaatgtggcttacagtgcaggccttagagcagtgattctcaacctgtgggtcctcttgagggattgggggtggggtgcagaggggttgaacgacccttccacaggggtcacatattagatatttacattatgattcataaaagtagtaaaattacagtcatgaagtagcaatgaaactaatcttatggctgggagtcaccatgatatgaggcaccgtactaaagggtggcagcatcaggaaggtggagaactgccttaggtgtatttcacagcagctgccttgtaatccagctcctgagtcccagtacctaatcatgtgtgtgtggatttgggagtgagaatctatcagagtttcctttatcaaaatgaaatgttaaacaataacctatggggctgtcatcagagccctggctcagttacattgctccctgtgctgcctagttttgtgtcaacttgacatgagcttgagttatttgaaaggggggaaccttgattaggaaaatgcctctataagattcagctgtaaggtttttttcttaattagtgattgatggaggaggacccagctcattgtgggtggtgccatccttgggctggtgatcctgagttctataagaaagcaggctaaacaaaccagggggagcaaggcagtaagcagcactcctccatggactctgcatcagctcctgcctccaggttcctgtcctgtttgagttcctgccctgacttccctcagtgattggctattacctggaaatgtaagctgaaataaaaaacccctttccttcccaagttgctttggtcatggtgtttcattacagcaatagtgaccctaactagggcacatccttacactgagatactcttcaactcttgaacagggtgagataggcagcctccattcaaactgtacctatagtgtcagctactgtgacggcttaggtgggaagacctatagagtcttggagttcaaagccagcctgaacattaaaacagcttctctaaatcatccattcatacatacatacatttatccatctgtccatccatccatccatccacctatctacatttatccatccatccatccatccatctgggagtagaatgtggacactgtgtggttttatttatttgtttttaccaagtgtgtaggtgtacatgtttgtaacatggaataccagagatcagcttcaggtgtcattcctcagatggtgtccactttgggtttttgctgttgtttgtttctttgtttttgagacagaggtcaccacttaggctagcggactagccagggagccccagggatcctcatgtattttccttgcccatgctgagattgcaagtgcctggctgtttgaaaagaaatgtggctctggtggttgaatttaggttcccatgcttgcatggtaagtactttactaagttatctccctatcccctaggtgtttaaagatgtgtgtgctatggtatgcacatgaagttcaaaggacaaccactgggagtaggttctttgcttaaaacatggggtctggggactgaactggggttgtccagtatctttaccctctgagctcacaggcctcctctgtattttgttaagagagggagcacatgtgggcttaatggctttaatcccagcactcaggaggcagatctctgaggtggaggccagcctggttaacagatcgagttccaggacagccaagattacacagggaaactctgtgttgaaaaaccaaaagagaggctgactgatgtgtctgtgggtgacacctcagggagccctggagcagcagggataagacttcactagtaggagtgttagcttcctgctctgtttctttttttcctagttattcaccatgcctgtagagtgctacaatgtatgtaagaaagatacaatgtatgttttgctggatgaattcacaatgagttttgacaaagggcaggtagaaggctcaaagtcttgattggaagatactaggcagactgtttcatcctctcttggggtctcaggtaagaccccatctaccaccccatctacccctgctggttcctaagcccttgatgagagttttgggaaaggtgcaaggtcagaatggctgtgtccctcctttttgcctacactctggccttcaaagtgtggtcacgggtgaccagtattggctcgtccatgaacggccttcaggacgtcattggcaggcaccacacatgtacgagcctcttggtgtgtggtgacgtgactaacccctgcattgggtttgatttcggcagcatgttgccattcagagttgagtgcatctgattttaagggaattcataacagttccaactaaatcgtggtaccctgctgtgaaaatctctccttcctgggaaagcaaactgctgctcagccgcccccctctgccccttccctcctcctgttctgctagcctttccccctgctcgctggggtaagggaatactggctcttgtcaaaatgtggttcttccctttttgtggtggaggcttggggtgggggtggggaatgaatgggagctgcagatgatggtcaccctgcctagaaatcaggtctgtttcccaaaagatggaggtgtagccaattgtcatcttagagaggagcccctagactgggaagtccggctaccgtggcctttctctggtattttaaggggtctgtaggtgtaatggaaagatcccttcagattagcaaggaatgtaacttccttcagcctggacaatggatgggggacaggatgggggagactttagggtcaggctaggggccccacctggataattagcattttgtgggtgctctccttgaaagttacagagagcccagcctctgtattggtatgtgtagatatatgtatgtgcacataagcatgtaagttggtgtgtgtgtgtgtgtgtgtgtgtgtgtgtgtgtgtgtgtatgcatgtatgtggtatctgaacatgcttttcctctgactgttagtcttcagctggggccatgctgcagacctgggtcttgtctgtaaggcctggtgtgggcagttctgtgctcatgtgcacccctttggggaggtgctgtggggaaagacaggaaatcctggggtcatgctgtggagtcagcttatcccaactgggaactccaggttcagtgagagaccttgtctcaaacaatacggcggggagcaatcgaggaagacatcagtagtaggattcttgcttctataggcacggtcatgtgtgagcacatctatgtatataccccccaccccaaacacacacacacacacacacacacacacacacacacacacacacacacacacaagaagcaatacatgcaaagaaagggagtcacagaggatagtatggtggcatactaggcgcatgactcaccccagggtgacttttcctagcgacaatctcatcatctgcaaatggaggcagggatacttcttgttgaggtacttgggaagactgagtaaagagacaccagtaaaaacctctggctggtggaatcatctcacggcgggtccttagcttccttcctccctctttgtgtgcgccacaaacttcccgcagctcccagcagcacggtgtgaattccccagctatttctgggtgatgttcctaacagatgtttaattctcctaacatctggtccaggaaagcagattctttttcttcctaaagacagccactcacagtgaggcatcagcttgtcactcaattgccttgtgcctcggtttctccagttgtaaatcagggataatgtacgtgacgctgcctggcttctttttgggatccggtggataatttgaggtaacagatggaacatttagaaagtgctcaacctcaccggtagttagggaaatgcaaatgcgagtgagggtgacaggccgtttgtcacacatccgattggcggccatttacaaagagggattacatgcaggtgggaccctgctgcacacctggggagggactgagagttgctgccaccattcccaaaaggcaggcatacacccttggggtttgtgtttaattgacctagcaatgctttggctggaggatcacatccctggaactagcagagccctgacataggtaggtggacagaggggaaaagctacagtagccttgcctgtaggggaaagaatccagactcatgtcagaggggacagctctctctaaggcaggaaatccctgctcggctatttgtagctcctgagggaaaggagacagtcatataggcctggagggtcatctgtgaatgtcatggaagagagtggcttttacattttaattaaaatttttttcagggttgtatatgaagcccagatcctttcatatgctagctaggttgctttaccactgagccacaatgagagactctaggctgactctttacttctgagcccctctgctccccctgaccgccccaccccccgtactgaccaggactataccactgagctataaacccttggcccccactagtggattttctgggtaggcattgtacctctctgagccataccctagcccctcactagcagattctaggcaagctctctccacacgcctggcttacaagttaccactgagatcagcagtagtcacagagatccaagccattacagagcgggaacccactgcgaaacgcagagggggtagggggatgcctgtcaggccagcggccgcgcttcttgttggatggatcatgcttgccttatgaagtaagtgcttcttctcagggatggaattatctaccaatatttaagtgtccaattcatatcaaaacccaacttctagacgttttactaactcagaagctccatccagcctggactcaaggccccacggtaggctggtagcatgaggtttcacagggggggaagggctgaggaatagaagagagaccgtgtcattgtgacatgcagctcagaaacacttcctccccacacagccatctacttacgcgatgagcgtgtcttaagagctcacaagaggaaaaccaaaactgtccatgaaccattgtgtgccgtaggttgtggtatttgtgggaatcgcctcgctgtctgctcgggacatgggctgagtgagagaaaccgtttcttccagggctgaactggggaactggccaccaatattggtagatatggccagtcatcacaacccttctggccagtcatgaatggtggaggggagccatctactgtgtcccagtgctgactacacagcctggggggaatccctgagagaggtagctgatggctgtctcctgagccagggatgggtgaggcctctgaacaagacacccagtgggtactcactgaagggtgatgggtgcctgccgtgccccacattccctgactctgtagagagctgggtataggctgtagcaaggtctctatcctgtgcccctcatatggagggaccctgaccatgctgtgatgggtgggaaggagtggccctcccctagccttcagggacagggccttcctcactgacatcacatctttccagagcccagctccaggctaccacacagatgggttgtggtttctctgtgagcctctttggacaccatgacccgagtttttccctcaccctcctgggttagaagataacacgatgcacttgagaaagcagaaaaaggctgttccttgggggctaggcggcttggtgagcttttcagacccgtcttcctgattaacaccatacttgacccttttcccgagctggctgtgctatgcttgctgttatgttggatctgcgttcagagggcagaggcagcagtctgaaccttgaacgtgtccccagcaaaccctccgtgcctgccctgagctttgcctgctatatcagtcctagtaaagcctgagtcctcccagccctctgcaatccatccagacccggacaaggctgcaagtagtggcccagaccctctcctcctgggagccactctattttccccttcccaagttgtgctttcctggggctgctgaggtggggttctgggggttcctgaagtttatatctcatgtgcatctccttgtttgtgttcccaggagccatgaggtactccctggtcacttgctatgctgtgctctggcttctcatgctggtgcctggatcctggggtaagtgccatttctctttgataatgccagccagtgcttgggaggccaggctgcaggttactcgggccagcagcctggcttcatgctctaggcccccagagagtgaatgaagacagatttccctttctgggcctcagctacctcctatagctcacatagggctgaaaatactggctgtccccaaggctcagtcccacggggagtcttgagaaattcttaggttccatgatctatagccatgaactgtcctagactgaggagattggctgcagttctgagtacctactgtgtgatgctgtgtgcatagtatgctacctctagggagaaaagacatcaacttccatgccaggggtttggtccagtagggaaggttgaagggaacagggtacagtacaggacatgctcatggggacatccctggctctagagaagtctctcagaagacaggagggagccatctggccaggtgagaaagctgtttatcttgcctttgagactaatagtcattttagaagagctggtgtgtgtgtgtgtgtgtatatgtgtttgtgtatatgtgtgtatatcctggtcatgtgttgggtgtggagcgggtggtggtaatgcctgtggatacccagaactcaggtatgtgatagcccagagctgtccttcttataggaatctctcccctcccccagtgccacaggagcacaccaagaaggtctgggcactttgtctttgctcctggggtaacaaatagaaaggaacatggagactctactgaaggaaggccaggactgtaggcatgtcgtgcaggatcccccagggatcagggtgtccttggagaatggctatgggcaccgcgtgcctggcgacgcaagcaagcacattcccatggggctctctctgctgcttcactccagggaggtgtggagctctggaagacattgctgcctcccactagcacctgttggagttcgctagcatcctgctgtgaagagaaccttctctccttgtcccctccttgtttcctcctggaataaccccagcaacgggagctcactcctattcaagaagtttggagctatagcgcaggctcacaggctcagagactgggcagatacagcctcggaatctttcacggaggagaggctggagttcagagtcatccaacctgagggttttggttttgttttgtttacttaaatatcacatgaacaaccctgatctgctccatgcagaaggcctctgggcttgtagatggcagaagtgaggaccctgtctctgtccctcgtaggactctgagcttagacactttcctgctttgttgcaccagctgtctgtccgttaaaagccacgcgtatgtataactacctgttcagcgggcttgtcccggtttgcccagggggatggctgactcccttgagctctcagactgttcaggtattctgcatggcacacctacactcagcctgtaggctcccttgggcaggcttctgaacctccctgggctgcattttctttgtctactgttcaggagcgacacagctcgatcccaagaatcaatgtgaacatggggcctgactggcaacatcgggtgccggatgaacgcttgcttgatgttcaccctgtcgtcagcagcatctacctttctttcttgggttggaacaggatgggggcacggaagacagaggagcatagcaagtctcccaaggccattcagccaattccgtggcaaaacataggtgatctgcccgtgtgctggctagctttgccgactacccctgtgcttgctaagtagccagagtggctcctttagcatggtgggtggctggtgcctgactttgactgcaggacatgttcccatttctgttgcctgaatgggaacgtgttatgttagctcttctctggtttccagactaggtcacatggtcctcccatgctggggcccctaatccccagaatgcactattactccatcccagagaggcagaggtgagacaggccctcacaagttgttacatcttctcagtctatcatttctatgccatagctcctgtcccctcccccagcccattccccataggctccgggggctcctctgctctgtgactggacagaggcaagctttctctgacccccttgtggccaggtgtcctgggtgccgtgcatgatgaacctcaggcagagaggaggcctggctcccctgcagacactaatgtttcaagttcctggagcccagtggtggctcctacagcagctaggcagcccctccccccacccccttttcccatccggaggctttgtcgaagtgatgcttggaataactctctgtgctccctgtgttctctgtgctcctcccttatcctggggcagggctagaggactctggtattccttgggtacaggactcagtgttgaaagagccccctccctccctccccccaccactcagaagcctgggaaggcggctatcttggatccagatggacaagttccagatccagctctgcccatgacgcagtatctacccagtccgtgattctgagtaaagtcatgcctgactttgcagccatgtgagtggagggagcagtcccacctagccatgaggccagcttgccttttgggccagcgtccttgcatgctctatgcctcctgtccctgcttgactttgtgactcctgctgtatgtatggtccatgttgggcccaccgctcagatgtctccttctatggccttgctctctgccttcttcacaccgcccaagtatggggcttagaagattgagccttgcatctggattccctgtccatttctgagaggccaggacatcagctggcaggggtgggtggggagaaggcagaggtgctaaaagtgttgaagaccaaggtaagcaagtggcccctggttgggacagagaacatgactttggaccctaaagccaggatcagctttctttccacaacttacccattgtccctccccctccctgtcttagtcagggtcattactgctgtgatgaaataccgtgagcaaagcatcctgggaaggaaagggtttatgtggcctctacttccatatcactgtccatcattgaagggagtcaggacaggaacctggaggcaggagctgatgcagaggccacggagggatgctgcttattgcttgctcccatggcttgctcagcattcatccttatagaacccaggaccaccaccatctacccagggatagaaccacccaccatgggctgggccctgccccatcaatcattaagaaaatgtcctacacttggatcttatggaggcatttctcaactgaagttccttccttccagataactagtttgtgcccagttggcataagatcagccagcacaccatatttccgcagccactcacgttatgcaatagtggaggtctccaagctctggccacagcggttttgtccctgggatgcacagccttgaaaaatggcttttaagagaactcgcctgactgccctccccactctcctgttctgctaatctctcccagtccccagaatccccaggccagctcccctggagactggtgatgaaggcatagttcctgcctgctcagtggtatgtgacaggtgactcaggtcccaagtctctgctaggctgcctgagtggtgtttccatccctgggtgccagtaggtcctaggaaagaaaatttagaaataaaccaagctgctgcaggcaagttttcttttttctccatcactaatttcccatccacaattctaagctcgctgtggcacccctgggttacccaggaccctccacaagccccattgttattgccactctgcacagaagtaagcagagggacagaggggtcgtgtgtctagacagcttatgaggaggtttcagagaggcgaggtgcggtttctccagctctgcctgagactgtggctgtgagcggggatgcatgcgtgtggcgcatgcgcacatttgaggtagttcagggagggtgtcctgaaagaggagacatggaaatgaggtgagacatgggacttagtacgggaaatggaagagccagcagtcctggcagggaagggagaggccagagtgttggaggagcagaaacaagcgcggtctggctgcctgtgatggtttgtatttgcttggccctaggaacagaattaataggaggtgtggcccagttggaataggtgtgtcactgtgggtgtgggctttaatacccccatcccagctgactaaaagctagtcttccactagcagccttcagatgaagaggtagaactctcagctctgcccccaccatgcctttgatgataatggactgaacctctgaacctgcaagccagccccaattaaatgttgtctttagaagagttgccttggtcatggtgtctgttcacagcaggaaaaccctgagacagaagttggtaccagggactgggatattgctgtgataggcctgaccatgcttttgtttggaagaatatatgaatctttggtctttggatttgggaagcactggaacgtttaactggggctcaatgggccatcctagtagggatatggaagactttgttactgtgagtgatttgaactgtgcagatctggctcaaaaggtttcagtggagaatttcaatatgtggcctagagattgtttttatggtattttgatgaagaatatggctgggttttgcccttgtctgaagagtctacctgaggctaaggtaaagagatttatattaattgcattgacaaaggaagtctccaaagagcctagcagagactttgttctttggttaagtctcatgaagagcattttgaacaagcgtagcaaacttagaaaggaaaaatataaatgatatcgttcgaggattaaaggggcaccaggaagttaaatggagctgaatcctgtgttccaggatattaaatggaattaaagaatagtaacccggggaaagatcccactcagctaaatttaggtccaggctcagtagcacatggctttaatcccgggagacagaggcaagcagatctctcgagttcaaggccagtctgggatatatcaagttccaagcagagaagagcttaaatccaggtgtgcagttacatgcctttactcccagcatttagaagacacattcacagagatctctgagttcaaggtcaatctgcagagttggaaaacagaaagctgtttataatgtaatagaacaagagggccatgttccagccccagcaagcagcagaactttggcagcttcggtcatgtgtctctggctttagagtcaagaggagacggagactactgggccaattgatactggttagctggagctaagaaattagtggtgattaaagaagagactagcgctgggcgtggtggtacatgcctttaatcccagcacttgggaggcagagacagaagttcatgtgtgaatccagacattggaacaagaagatgtgaagttgaagttaacttgaagaccccaagatattaaagatgccaggacttgtgggatatctgtcaggaagagctgctaacagggaaccagcccaagagaaagaagtctgttgcagtcaacaaagatgaaaaaggagttggaatatgaagaccgtttcgacatcagccatggagatgcagagtttggagattgcccagctgatttcctgtcttgctttagggattacagttcagtgactggatgaatttgagaaaagaccttgaactttggacttttaacattgttgagttaaaagttgactatggggactttggaagcttgattaaatgtatatttttattatactatggctaggcatggcctctgtagacccatgtgtttgaacaagcctatgggggcaagggagtggaatgtgatggtttgtatatgcttggccctggaagtggcactagtaggatatgtggccttgttggagtagctgtgtcactgtgggcatgggctttcataccctagtcctaactgactggaagccagtattccactagcagccttcagatgaagatgtagatatctcagctttacctgcaccatgcctgcctggatgttgtcatgatcctaccttgatgataatggactgaacctctgaacctgtaaggcagccccaattaaatgttgttcttatgagagttgccttggtcatggtgtctgttcacagcagtaaaaccctaggacactgcctaagcagaaggaagagagatcccatgctcctgtatgtccccattccctctctgactccagcctctcaccctttgggaacctcaaatgagtttaaagggggccagatcaatagaaacgagagtggggtagctgtcctgcccctcccaggacccctgaaattccctgtaagagcctatagcagggaatgcaccgtggaaactgagctggctctccagttttcagtggccaagcagaaagtgtcccctcagcctactgaaggaggaaatggagaactggagaagccagccttgggggaggcttgctaggggctttgtagtcaattcccctgtctatatacctatcacctggctcttcccagccttcaccctcatgaggtgctgtcagagtgcaccatggttaatgggaaatttttgggttccgggctccggtatagcctgagctacaactgtaagccttatctcaaacctgcctttctgttactaggctaatgtgagccaccaatcccttgaaataacccaagagtccactgccccatgggaaatcctccacagcccacaggtgtgagcttgggatttgtaggagccatcttagaaaaataaaaagaaacagtgaaattcatttcactagtatctttcaccttatctaaggtatccctatttcgatgtggcatcaatattaaagattagccacagagttctgtggggagagtcaaagaagtctgatgttcatttcacgctcagagcctgtctcctcggggccagtgctcagcagctatctgtggccaacctgactgtcttgggaagttggtgtggtacaagttcaatgccacgcagcccactctgtgtcactctgtaggatatgtaaaactggccggggccaccatgctgacatcttgtcctctgtcttgcaggccaggtgaaccgactacctttcttcaccaatcacttctttgacacgtacctgctcatcagtgaagacacgccagtgggtgagttggtccctgcaccagtgggagtgcgggcagtgtggggtgggatacattctgtaagtggaaaggatctgaaggttgagactatcttcagcctgtgctggaatctccctgtggtattcatctgccttttgtttggatgcctgtagggacaggaccctcactacacctcatagcagcccattgacctattcaaggtgagggatctgctaaacaacatggtttcccactgcccccagtgctggtttccagccgggattagttttattctaatatgccccacttctcttctgctccaagtctttgtggaaatgtgaagatggcagcctgtgtctctgtactttctcagtgatgccataactttctgtgatgagctggctgggttttgccattagatgtaggtgactttgtgtatccagtgcctctctgatccaattacctcatcacagggctgctggggctggcttcctggcatggctctaataacggtagctcgaggtctgtgtttacatctctgagatcacagctcagctccaggaaccaaaatccagagaatgagcttgaattgtgggcactcatctgtagccatgccaacgagggccaaaggcttagcctcgtgtgtgtgtttgtgtgtgtgtgtttgtgtgtgtgtgtgtgtatgtgtgatctatgagtcccttgagggtcctgctgagttgcttgctctcctcaaggataggtggggaaggttgtagtccttggatccatcacacattgtgttattttgagagtttatctgcgtggcatgttccttatgcagttctggaatggggctgtgtcttggttagggtcactattgttgtgatgaaacaccatgaccaaagcaacctggggaggaaagggcttatttggcttacacttccacatcattgctcatcttttaaggaagtcaggacaggcactcaagcatacaggaacccggaggcaggagctgatgcagaggccatggaggggtgctgctcactggtttgctcccccattgcttgctcagcctgctttcttatagaatccgggaccatcagctcagggttggcatcacccacaatgaactgggccctcccccatcaaatcactaattaagaaaatgccctacagccggatcttatggaggcattttctcaatcaaggctccttttcccagatgactttagcttgtgccaagttgacataaaactatcctgcacaggctgggatgagcaagacagtgtagaccctagaacctgtgtacagtctcggcacattcaagcttttaacattgccaaagcaactcgagaaccacgtgattgagttacacagacaaacaaaagcaaaagcaatccgtttatgctttaaggaggttttacagttttgtgttgggttacatccacaattcttcttgattgcacatggcctcgtggggaccatagctgcagattggacacacgcctggcaacaaatgcacgggtggcccgccctgtgaatcactcttaggacttcagctcccttccattcctgttattcctccttgtgtcagagatacctggatacccacctctgtgccatctctgaatgtcgtgaccacagaggggtgtcaggcagatggatgaagaaatcagggccctgggtgaacaggggctgagtgaacgtctggtgtatcccccagggtgatgagagggaacaggacagaagtgggaggagctgtcccctccattgcctaccacttttgcaccttttgaacctgctcatgtcaccccacccatactgagcagtcccctgtggtagaaggtatgcattgatgacagcggcagtggcgtgactagctactgactgactggtgctggctggaagggacaatgggcctcctaagggagcagggctggctgtgttctgcctgtcactccaggcccatgttcatttggcatgcccagagacccgctgtgcaaggaaggtaagagtgggtacaacttggtcagctccagttgtgaggggtctgaggctggagacccagcaggagccgtccagcaggcccacttcctgttacctttggctgcagccctggcttgttctctgaaaaggccagcgtcgatcatctccagcgtcgatcatctcctgggagccactcctaagcaccgaagcccctccaagggtccacttggctgccacagcagagatggctgtctagtgctatgggattaatcttggctcaatccaaggagctgagggacacctctgcctctttctcttgggaagaagcccagcagctttctggttttccccctttcttttgcataacgatctggacacagcagcgctctaagcctagaggccagaagccaagcttttgttccttactgtgtgaccttggacacagagccacaaccctctggttctccatttcttatcttgtcagtgagaaaattttacagaagtgtgcccaataggcttcggtctgggcggcctggctctgcttgtttctaggttctctgatgatgctggtctggagtctcttgcagagatttggtactcataacgccctgggctgttcacactatagatgttgactccctctggatgtggcaggcatgtatgcagggtcctggcctttgccttctttgtggaaggagaaacatcccagagacttgactttgaggactgaccacttctacctacctcctttctcaatatgtatgccagtctgaatattggtgatggggaatttacttgaaacaccacaaccccaaagcttccatacttggaatatcattcctggagataaaactctatatagcccagggatggtgactggggctgcctaccggtcagtggcttacaacacactgttaaaggccagaagaggctggctctggtgtgtaggacaatgtcagagccccagccagtcagttcacccactgccagagcttgggacagctgagctggcatttcctgggctatgctatgtgactttggcttggacccctggtcatggggcttgtgatgttacaacattcctccatgggagaatttaggaccaaaatttcttccctgatattgatatgcaacctgcctccctaaaacctttgaccacttgtctaattctatctgttggagcctttaagaaacaatgataatgggatgtatatgatgtaggtagaatttgttcttgtaacagccacatttactgaatctcagcacagtgccctgagtgttttatgtaccaattcattaaaaacaaatcattagggtatcagaggaaaggcttggccaagggctctttgctcctgtagtgtctgggaagtcaagctccaaggttagagacagacctgctacctgctgggtattttaccatttggtctcaattttcagtggcatgtggtaggggactgggatgggagagcagagcgtggagaacacgatattgctatttctgactttctgggctccctctgcttgctcatcttttcgaagaccatctcctagccagagaaggaaggagtcaactgacatcattgagtagatcagccttcttctggcctgtccgcacagccccatttcccaagtcaaggctcctctgtgtatgtgtcctgctgtgggcatgaagatcagtttcaggtcatagggctgggcagagggactgggggcaaggacagatcgacggctccatatctggtcaggctgatgagcgtcacacatacctgggctgcctgtgggccatgaacagacagacatcaggaacctgtagcatgagatggctactcagtccagctggcctgaaaagtccgccaatgtgaatggaactaaaattaactatgagctgggtctgacagcacaggcttgtcaccccaatacttgggaatctgaggcaggaggattatgaattcaaggccagcttgggctatatatcaggacccttgctcgaagaacaaaataaattaagagcaccaatgccctctatgtggctgaatttgtggttaattctttgtccttgcgatcctttcccctccttgtgggatgctctccttcatcttacctggttcctgtgcatcatcagctccacccttccatattggacggttggggactcagctcttgtgttatttttcaaatccattttcccatggtttattgtctagccttggccccttcctgggtccctccaggcggagtggcaggctttctcctgtgtctggttaccctctctgtggtcgttgttcgcgtggatgtttccaggtagacagggctaactccacgtcctcggtccctagccctatgcttcacatatgctggggatgcctggtgtctttgagtcagtggaagaatctttcaaggctgaggactggctccctcacagagcctcaggccatagctcccctgacagtgagtgtcaggagggcggtgttggtggcagtggaggtgctggttcagagagtgggcccaggagagctttcccccagatggcacagacgctaaacgtgcctgtgcttttgaatggcctggcccatgccatgcaaggatggcgattttatcattccagatgcctgatggagcttcatgtagcatatttgctaaaaaaaaaaaaaaaaaaaaaaaaaaagaaagaaaaacctctggggcatagaacatggctgcccagggagggacccagctaggcttggaaatatccaacctacccagctcctggtagtgttaggagggagtgaaggtgtatgtattggctttggacctcaggtcctggagtcggtgatgtctccatcctataaatgccctcagcccaaagctatctgtcacagcccacttcccctctccccacagacacctgctcttcagccatatccaagtgttcagagcccagaatgacaaatctgccccatctctgagctttgatagagactggccccttggctcaggtgtgggctcttttccttgcctgacaagttcccgcttaaagcccaggtcagcagccctcgagggctccagcctgccctcccttgttcttgtaaactttgttattaactctgctcagcacctggagacttgtgccccagctctttgtgtggaactcctcacagggctattaatttttttacatattaagtttatgaataccgggcattgcgattaatgatcattttagtgttttggtggggtgtgagagcatggtgtggtgacattagctgtggcttattgacttctggcctcctgcaggctcttgttaagcactttagatgcgtggcccccgggggatccaccatgagccccctcgacggatgggttgttatctctgctttgcagctgcacaacatgagcctttccacaagtgtgggggcccagcacggagtgggcagggggatgcctgtgagtgggagaatggatgagcgagtgaatgaatggccattgagcatctggccagtcccctttgcttggctcctcatctctccatttgtcacccgggtggcttcacagggagctgactcccccaggcagaccctcagcacccccaaagtgtcttgagtcaccgcgaaggtgataatgcccacgctaatcacctgcacgagaaaattagtcttgtcaggagtcattaaggtgggagctcgggaggcattaggatggagcgggcccaggcggcgcctggcactgctgccagttggcactgattaatttttctgcaaactccatcaatgcccagctgttttgtctggacctggggaaagcaatttccaggtgggcagaccctgctgcatcgctcttccacacggaggagctcaggcctgcttgccactcttgacatctcccagggagcggtgggagaggagaggagagggggatgatgggacagcaggacggagtggagggaccagaatgtgagctgggctgtgggacagtggagaataaggctgagccgtgataggatattccaagacaggaatggaccaggcttaaccccagtagtgggaaggggctctccctccttattgggcctcctccctgaggctctctaaaaaggcagacaagcatctctcaggagagggagggcagtcacagggagactgttatttcttttttcagccccaggcagtttctgaggactaactcaatccatagaggggctgtggattctctcagtgagggctgctgagcaagctgccagggctgcagggatagaaggcacgggtgtgaggggctgctagcggtcctgaccgtttgaggggcatttgactcttagtacagaggcagtgactctgtaggtaacaacagtcaagagactagggtaggcagggtggagggaggttagcattcttgctgacacaagattaaaggtcacctatgtcggggagtaagagcctggattcctcatgttcacccccatcccgcctgagggatcctcagagggccccatgatgaacccaggtgcctcttgaaggacagttctgtaattattgcttcagtcaacgctgtcccactttacagatggaaaaactggggcctggatgctgttgtttatgaggagctttgtgggcctcattcaagaagctgccatgactgtctatgccacaggaaggcaccaagtctctcaagagtgacagccaccacaggacttggtctgggcagatgctggacaatctgtctatccaggcatacccgtcatagtcaattatctcgccattcatggcccaggcagccccatgttattggccaagcccatgacatgtctacaggggcacagagccaaaagagcagcagagactagggacagcaccatagagagataggaaacttttattttacttttatttttattctttgtttacttatttggggctttgtattgatataagaaactcaggctggccttgagctcacagctgctttgatttccaaaattctgggcttacagattttagccaccatgtctggcttcagaggaccactttatagaatactagtgtgtagtcttgggataccctgagattatgttattattatcacgagatcattatcccagggataggaacaccagcttaggttaatagctctaaattgattgattgattgattgattgattgattgctggcctggaactcactatgtgtgccagtctggccttgaactcacagagctctgcctgcctctgactcctcactggtgggattagaggcatgcaccactaagcctggctgcttttgttcttagctttttattttgtcattatattaagcatggaagaaaactgctggagaagtccagagagctcccatcatctcgtttctcttaccatcaacatcttgcacaaatatgacacaattatggaaaccagaaacataacatcgctaagatgctgttaatgataaagagtgtttacattccaccagcttgcccagtaaaagaacattccctctatttcctgcaggcgagatgatttatcttaaatttgtattttagctgtggttaatatttgggcaaattgaatcttaccctggagccttggatatctgtacacacacacacacacacacactatgcattcaacaagacttttccttgggtattctatttgttgggtgctgttcgaagcccttagcgtttccaacagacagacacgcatcccagtctcaaaggggtgagctaggctagccaggggaatagacagggatggagagcaaatatctagtctgcacatgttaatgataaaggagaataatggtatttgatgcaggctaggggtgggcagtggtgctaccaacctctaccgtgtgtgtctattcttaccccagccccaggggccatggagaactcccagcagatgtgccccactgtcacctacaaggttcatgctcaaaaacagcacaatggagttattaaaaaaaaaaaaaaaagaaaggaaaaagaaaaccacataaatagttcttaaaatgtttttagtatgtttgcaatttcatattgggctgtgctcatagctctccatggaccacagattgatagggcccaccttttttatttatttatttatttattatttggtttttaagagtttatctgtatagccctggctgtcctggaactcactctgtagaccaggctggcctcgaactcagaaattcgcctgcctctgcctcccaagagctgggattaaaggcgtgcgccaccactgcccagtgggcccaccctttctaaagcatcctttagggcagtttggaagccattgtcttggtcaaacagtcgtgtttaaccaatggagaaaaaggcctgagaggacggagctcgccccaggtctgtgggagtcactgcggggatccgggttgcagcctgccttgccaatgcaaagggaataggccccagggaatggcagtgttctgggctgaagaatcagcttcttgggacttgcagtttgcagaaagggcttctgagccattgttgcactgccctgggggttgagtgcctgagcagaggcagtttggggtcacccacgggctcttgtggtcagcagtaagagaggaagggggttatgtcctatctgtgcaagggatcagatcttgaaacctaggagcccccaggccctagggtcttttgactccttggaggatgcccctcttccttctgggaggcatgagttcatggtagaacctgagggaatgtccgccactccgactggctttccttttcccaagaacagcacagaccttccacagaggcatgggacaagatcattggcctcacagggacttcaggggtgtagctactcctaacgggccctaggccagcacaccattgctacgtggggaggggctcggagggggtgggcaggtgttttggatgcagcggtaataacgctaatgataacaatgatgaccacctgtcatgtgggcaggctgtgaatggcacacactgaacacctgtgccaggccatgctggggaagagagcaagggacacagatcacagatgactggggaaatggcagctatctcttattacacggggctttgtctggaaatatattgctttgtatagcaagccgagaatgtcggcctcatctgttttgcagatgaagaggcagaggcttagagaagttaatgtaagcaagcttgcatggcttctgcaggatggagttggatttgacccctggtgtggccagaacccctcaggcctgtgtacttaaatggcagctcttagattctgcatgtgggcttagctttatggatccctgggttagagcatacaagtccctcaccccataataagtgtttcgctcacacgggagtgatgctaatgcccctgagaagagaggaatttattcaggggctcagactcagagacagtatctcaggagaggtgtcagtgacggcttgtggtgaatattatttgggggtttctaccccacctcagatcatttggtttacaaacaagagacacaaaacctttatatttataacaagccttaaaacaccagagctgatcagtgaacttccctgcatccatttgtcctttctggaccacacagaggatgataagcattgagggacctccatttgacaatggcttcatttgtggcagctattaattcagggctttctacccctccctagatcaattagttcctaaataaaagacacaaacctttatatttacagtaagtcttaaagcaccagagctgggcagatatctatgttttatgctgttttgtctccttcccagtcgatgatcccgagacatcgcttgctgtgttccacctgggctgccacccctactccaactggccagtcctcagggccatgtgctcacgatccatcgaccccatggtgcctttttccttcttcctttctttctttatctaagaatctgaaaatttgaaatctctatttggactagaaggaagttcttgctgcctcacgttggttcagcaaagtgaggggttgctggagccaggtcagctgaagccacaggatggggactgcagaagctgagcagaccagctggtcgccagcagggccagtcgggtgctagagaggagaactgggccattatgattttttaaaaaaggatagtgactgtttagttcttgtgtggcctatatgacgtcaccaagagtgacagaaccccatgctattgtgttttacttaataaatgtggatacctgttaggtgcccatagcccctcagctaatagcaagagttgtgggggggggggtctttcttttcggctgcccagcagattggtaggatcctctctgagcttgtcacccaagaatgagccacttgcccagtggctgagtaattgtggggctactcccccagggagagccttgtacagaccctggattctgcctctgtccatgcagtgatgtgaacttagggacatctgcttcctgggccatgaggcctgttgacccttgggagatagatgtatgtccttgttggtgacactcctcagagccagccacacgtctgcataatggcccaggggaggataggttcgtcaggctcctggccgtgggtctctctttgggtctgagggctggagacaagcctgaccattagggtgagaatgagctgagcttgcagatggccgggaacactcgggctccagggagctggcggaggtataatttacaggaactgaaaccctccagctggctgctgaggccaggctggcagaggcgactttgaacttgtcatcactgttctcatccctgtggggctttatgagcctccggggacatgtgcccgacagtcagcccttgaccaggaacaggccagtgcccaggaaagctgtttccaaaggtctttacctgacgcctctgctcgattctccttccggacctgagcactgtataccgagcctcagaagtggaggcttgggggtgtgggttcgactcccagctctacttcttattagctgtgtgaccatgaacaaggctcttaccctctctgagcctcgttttccccatctggaaatgggaaggatcacacttgcttggataggttcacagtggacttaaggaggagctttggaaatgcagttactatatggagtgggtgctgttgtgactgagagatttgtctccggagccccctcccttctccacagtgcatctactgtgccaccccgtatttcacttctctctgactcagtttactatcttagaaagtgtgggtcatgattccaccgtgtctccttttagatacccggaaggctttggcacatgggaaggacctatatggaataataacccctataaacactgcctttcttgttggtcagttcttgtccaaataatgagtcacagctgggggtaggaatgatggcttgaggcttcatgcatgattcttccaagggatgttttcatggtcccttgagagaggccaggggcttctggcaagaccagggaaaccctggaaagatctacctgccaactcgtgtctgtcgcagtgagagacagctttatgtctccctcaaagagactcacccccagctcatctctcctcacttttgacccctgcctcagcatctgctgtctccacagctcccagctccgcagagtccctcttcacacaacacccgtgtaggcccacagacagaggcccatcctgaaatctgccctgatgcccagtccctgtgacctgcctctccctggggacagatgtcactgcccttctctctcccagccatgtccaggttctgtgctaagaacctttgccgtgacctgctcgttctgtcctcacaacactctgtggaagaagtggcaatgagctcacatcatacgtgaggaacgggctagagtgtttgccgtctctacaagccagtgagtggcctagctaggcacaggccaaactctctctccctacctggctggctctctacaatcttcagtagaggttagagtgggcagagaggatgccccagcccccttggagcaaggcactcaccctgccctcagatgtggtctcttcctcacccaccttcatgccacagtagacagaggtgacaaaggcctcaagtcttggtcccctctgctcttggtaggtgagagacctgcctcatgtcacagtcttgcctgggactccttccctgggctattgagcagctagactgtgtgcaggggatggaagccatctcctttgacaagtgagtctgctcttggatgggtaattcaagatgcatacgtggtactgttgaatgagattaggggtgggtgttcggcatcaggtctactctgctatgtctctgtgagctcttgggagaaactgtgctgtggataactcaggcttgacagacagggaacatctgtctcctgtggtctctggatggcagaaccagtgaggcctgaggaccctgcttgtatgaccggggctggcaagttgctgctagcctcctaaactggcaggtactccatatgggctctctcaggaccaaaggacggggaccagtcatactggaaatgccacagcaaaggggctttcagctccagatcatattccgtctgtgatgagacacaggaaagagtgtaggtcaaggaggggacgcgactgccacagatgacagaaggtgcttcaatcccaccaccggccccctagggtctctgtactgtttctggagtcacactgtgagaagctctaccacctgtgccatgttcctgtgtcttcgagctgttccctttccacacacctcgtcctccgaagaggcatctagttatctgtggcaggctggctgagtgtgctcacacatttgcacagacttctgaagtcattgcttgaagcatcagccccactatgggccacgcccgtgcttgttgacagggattctggatattaaaggcagccatgcctgcttagcatttgctgctacagtttctgccttcaataaggtcatagctttctctcttccctgcccatacccggacagtcccttagaatgcagtgggctgtggagttcaggagctgtggctggttggagactgtggtcaggtgatcatggctgtgctggcttggctcccctgcccagcagtatcctgagtctctgcatcagaatctctgatcgtccagggaattccctaacctgccaaggtgaccaaatccttagcaatgaggccaggctgtccacctaagggtggacagtatcagaaatcagaaatatatctgcaggctgacagtctcactcctgaaggagggctcaagtctgaagtactagtttccttcctgctgcatgcccttgcaatggctgcctcagtttccctatcttataatctaggcatagcaggcctctgtcactgcgtgccttgcctgttcccagtaggtctgacactagaggaggcttaagacacccccccccaccttgccacctgtagagattttcagtcctgacctatgacccctagttttattttacttagaagctcagggcggaggggtggagggttagccagagatcctgtgttcttagcacattcttagctaatgctgctgctgtgtggagggggtgcagaccccacttgggtctgctgtgttagccccgctgtaccccctgagtatcagagtgctgccttatccagcctgggtgattcagccctggacaacagctagccttagagcagtggttctcaatctgtgggttgcaacccccttcggaggttcaaacaactgtttcccagggatcacctgagaccattggaacacacagctatttacattacaatttgtaacagtagtaaaattgcaattatgaagtggctggggatcaccacaccgtgaggaactgcattcaagggttgcagcattaggaaggttgagagccactgccttggagcgaggtgtgggatcccaggagcctctctgcctgtcttgcaggcttgcaggcctcctgattgggaaacaggttatgctcgctttacctcagctggagtccctcctaggtaccaggcaggcacgtcagcgaggaaggacactggagagatgactctacttatgggcaagctccacccccagccccgcctcctgtgtttacagagtggtcatacgcagtccataatcactcctgacagccttcattaaaagcacagggacaattaatagtcaattaaggcacagagagctgctttccttctctaggtgcttccccactgacacttgtcaccgagggagtcccaaggaatctgtggacgtgggatgtcatggaggggatggtggcttctgaagctggggtggccgaagctcctggctgagcactctgtggtgcattcagccacaggctatggaggaagtgcttgagcctggtcggtccccaagggagcactcacttcactctcagagcatccatcttcctgtacagcagggctggttagtgtagttcgcagagtgttatgcttttgtgatgaaatactgaatggtatgtgctgcgtggcaaggatggttgtccccccaccggctcagctggggatgtcccttcctcctgtgcagggcactgcaacagacctgaagccatgcagacagcaacagcaccaggtcttccctggcctccttcagcctcttactttttaatttgtttccattcatttatttatttatttatttattttacaacctaatcactgctccctctccccatcctcctcaaacataatccctccccttttcctctgagagggtgggggctcccctggatatcacccctcccccatttgtcacatcaagtctctgtggggctagtcacatccttttccactgaggccagacaaggcagcccagttaagggaacagattccacaggcaggcaatagctttagggacagcccctactccagttgtgaggggacccacatgaaaaccaagctacacatctgctacatatgtgccgtgggcctccgtccagcctcaatatactctttggttggtagtttagtctctgtgagcccccaagagtctaggttagttgactctgttggtcttcctgtggagttcctatcccctccaggacccacaatcttctccccaactcttctataagacaccccaagctctgtccaatgttaggctgtgggtctcacacagactcttacagtctctggaagagaagatagaaggcgaggtgtgtgtgtgtgtgtgtgtgtgtgtgtgtgtgtattcgttcttctagatgaggcctctgacctcagaaaaccaggatcccagggtggacagcctctttggagaatgaagatgcccacccctgactccacggaagatgcaaacagctctgttggaggccgtgctcttccttagctcggtgcatgtgtgtggtgggctggagaactcaggcagcagaatggcattgcctgccgttcagcccccaaatgtcaatatctgggtctgtttgggaaatagcatgttctgaaattagaccaggaactgtatagaaaagacagcctgcctgcctatgacccccaacagggactgatccctgcctcagcctggtgccctcattcagggtgctgacatatggacggtgacacatgacatccgacacgtgcccagcacagatccgggcacaccgtcaaggcttcagttctcagctcctccgctccccacccacttcctggcagaaaacgacacttttttcctctcctgaaatcatattctgccttgttccatgctcattaaaggatgctagggagtggatgcatgcccaccccctgctgccctgccctctcacccgggcaggctctcttctcggcatctgtgtgtgtggctgagagtgtggcgagggtggaaggtttgcgatggctgaaggagatagctgctctcacctccctcccccatgcctctgtcctctgccatagatttagatactgtgaccaaatggcaggaagggtgacgggccagggtatctgcatgtgaggaccctcaagaccaagtgcaccttaatgttagccgccctgttttgcctgacctgggcctgttgactccccattctctgtctcttcagtcaaagcttcgatctgtcagccacagactagtaacccatcaagagggtgtttatgttcctgtgagcaggtgaggagcaatagtcccgctgttgacgtagacctgcaaactgtggaggcaacactaaagtcagggcagcctacctgtgtagacaacagggacccggaaggacagatggccatatttgcactatagctgttttattatctgggcgctaaggctctggagacccccagatacctgtgatgagtactagtccatggaaatgtatttctgtctcagccctgctgtgccagggccttctaagtctcccctgggtggtactgagtgacctgaaagcttaggggtggacaaagcagagtttggtagtgtggagcaatgagtatctctcataggcaagtgactcaaggttggcctggctgtgagtactcacaagtcccttgctgaaggcagctccctcctctcggtagttaaaatagggatgatagcaaaagatgtcctttaatatccccttgtattctagcactcctgaactcaaatcccctttcttccagtctttctgtgtcctgtggagttacaggagctgtcgttacggaggtttctgtattagttggtgtcttagtcagggtttctattcctgcacaaacatcaagaccaagaagcaagttggggaggaaagggtttatttggcttacacttccacattgctgttcatcaccaaaggaagtcaggactgggactcacacagggcaggaacctggaggcaggagctgatgcagaggctatggagggcgctgcttactggcttgcttcccctgccttgctcagcctgctttcttatagaacccaggactaccagcccaaggatggcaccacccacaatgggcccttccaccccttgatcactaattgagaaaatgccttacagctggatctcatggaggcatttcctcaagggaggctcctttctctgtgataactccagctctgtcaagttgacacacagaaccagccggaacagttagttttcttgtttcagtaaaatgtctgaccaaagcaacttaaggaaggaagaatttattctggtccagagtttgcagacatataacccatcacggcaggaagaacggatggcagaaacccaaggcagctggtcacattgtgcccacagtcaggcggggggcggggggcgggggggaaggaatgggcagttctcagctaaattatcctttctacttagtggggatcccagcccactggatgatgccagccacactcagggtgagtgctaccactttaattaacccatgtaggcactcctgaaggtttatctcctaggtgatttaacatcatattaagttgacatcagtactaaccatctctgttacatagacatcaagtcttttggttcccccccaccccccgtttcaccaaacctttatgacccctgtgctaatggctgccaaagttggcctctgtgtcactggcatgacatactttgagcacatggggacagtgtgttcctgcactgtgccaatcagctctccctatggcaagaatgtctcgactaatcacaatgtgtgaaaacaggtttattttaaggtatttatttatttacttgtttttatgtgtatgggcgttttgcctgcccccatggctgtgtatcctgtgcatgcagtatccttggaagccagaagagggcatcatatacactggaacttaagttactggatatcgaaagctggcatgaggttctgagaatcaaggccaggccctctggaagagcagccggtgctcttaaccactgagccaactctgctgcatcacaaagcaggcttatttggaactcataacagtttgggcaattctacgccacagtcagttgcccctgtggtccgtggtgaggcagcacgtcactgtttcatggccagagaatggtagagaagaggaaagggcttggggttccatactccccatgagggcaagtccctgtaatgatttctcgcagtttccacagttcctaatatctttgcatgctggtgaccacgcctctaacatgtgtatctttggggagagtccccgatccaaactacagcaagtagctgctgctggccacatgtgatcatttagaagcaaatggatcacagtgaaataaaaagcccagaaaattctctttcttgtttccactggccacctttcaagttctcgcttgggtcccgtggcgactgtgtcagacagtggacacacggtgtttccattaccacagacacttgggcatggagtgtctggttctgaaataagagcctgaaacttggcagtataccagagtcacccatctgggggacagttgacccttgcaggaacactcaagttctggctactgttgtctgggcctgtctgtcctccctctgggcctgagtgtcctccctctggacctgagtgtgctccctctgggcctgagtgtcctccctctgggcctgagtgtgctccctctggtcctgatggtgttccctctggttctaaagataaggaaaattttgtactagtggtgtgagaagaggtaacggaacctggatatgaccaagaggccaagtgggtgatgaagacagagggcctggagccagcgacccccagccagtggttcagggcagctgtgggtgaggtgctcacccgaggcagtcctgatggttgtgatatgtttttttttacagctgtttacctgatgttctgtccaggagtgaaataactctccccacggccactatgaattctctgctgccctgggaaaggcagcttctgtgatgggaacattgtctgcaatcctgtcaggtagccaccttgagtgacaggcggaggaagcaagccgctgaaagccattaccctcgcacttcagtgcggttggaaaaatagtcataaattagtgccgggtgctgaacgaggggagaggaaaaaacacaaaaagaaaaaaaaacccgcctccttgaaagtcatcatttttctcctgagggtggaggagcggagctcacaggaggtggatgtagcacccagtcttgctggtcagccagtttggccatattggcaaatggacgcaaagccagagagatggtctgggaagactggaaaatgaagcatccacctttatgtgcacgcatgcacatatgtgggtccccatccacacatgaactagtgtgctttgtaagatggtgtcctgcttctaagtgaacttccatcccctgtgttgtagtgaatcaaaccacgtgaccttacctttatctcaggctgtactgagattctattctgtaaggtgttctctatctcagagacccatgtgaagcacctgaccctcagaaggctgcacatgggctctcgtgtatgtgtgtgtgtgtgcgcgcgcgcatgcacatgtatgtgagtgtgcatacctcagggctgccgaccactatggaggctgctagctttgatgaggctgaaatcaaagggaggaaaaggcatctctatgggacgatccttccttatgggcctctggctccggattctcaaaggagccatgaataggggccgggcacaaggcagacaggtaggtccaagctcctttggagttcttagagctaagggcagagggtaggctagacctgggctgtgataagcacctgcatgttaagcatgcaaagaaaatgatgtgaacttgaaccacagcaatctgtaagtggatcctgtagttgttagaccttagagaaatctgcttagaacagatggctgggttccatccctgggatttggggagttctgttttagcaggcattaggtagtatgtatttctattgtggtttgggtgttgttgatgctaatcggtctgaagaccccacattcagaaccattggtgatgcagcttaaactgtacttcagttcccgtgaggctaggcgggtagggcatacagtgtggtagttagagcatggttcctggctgcagaggttcaaagaccgtctctgccacttgtctgcagtgtgtccttaggctagggatgtagcctctctgtgcttgtccttcctcttctgggaattgggagaggagagtgatctatgcccagggccagagtggaaacgtggcatgcttgattaacaaagcttagaagaaagcttaatcagcaaagctaagaagagatggcttccgtgtctgggctgctgtggttacctccactttgcaggtgaatgacctgagctttagaggtcatgctgcacattcaggtgacacctcacaccctgcccccaaccctgaagcccatcaattcctgtttgcttgggtcttgcttggccctttgtccgttctcagcggtaagctcccttctctttctggtgatgtgtgtgagttgggggcttagaccttagttcttccctctcagcaaaagaagtgtggtaggacaagtcccataggtcaccctgacccttaccctctaccactcttcactctcccagctctgcagcgaagcccaggctaccacatacccctgcagggctaccacctgcccctgcagctatgctactttgaagccaagcttgaggcttatctggagtgttgggatgggggagaaaagctggggagccagctaaccatgcacacgcatggagatacaggagcctgtgcacagggcacatctatgtgcacatacactcctgtgacaccatgctcactcagtgcatccggaaccctactgtctttctgtggccctttgcaaagggtgggcttccttgttagtgaagatagcatagtcacaaggataagctgaagggttctggtccccaagatgcacgttccccatgtctggatggttctatgggcaggagtctggcaggttctctactttggtaatacacaacttgcgtctggactgtgtttccctcagggatcctgagaatcccctcgcatgatctgaatgagcacggtcaccatgtgttggtgttctgccccattcccgaatcccctcttggttctgcatatctcacttctcagctaactgggccacccaggctggacgtgggttgcagtgtggcaagctaagaaggctaaagagggaacaggaagagggacccctggggcaaggaactagtggaaatagtagagtacagcagttggaccacttaaggctcaaaaccaggctgtaaggctcctggcccagctgccaaccaactctgacttcctcccctgcttgctctgcctggccttggtgtgagccaaggatattctcactgcagggtcttcacacttggctggtcctcctgcctgggactttctcctgaagactttgcagagaattcacccccatattcctctgtgagctctagagatcaggagacttctctttgccatgcttcgacccacatgcccagccgagggcttggcacgcagaggctttcttagatatttattgagttttttgagaaggtaaatgttagagtggatggatggaggagaagtgtcagtacttgggtaaggagttctctaagccccagattcttaaactgtaggttacaacccattctacaccacataattgaatacgttggctgtggggggaaaatcagcagcaaaaaaagtttccagaaaattcattgatcaaaaatgaattcagaataaacacattgtggataaaaggtgtatctgtgttccatcgcgtcacgtcaccgaagccttgggcatgagcaccccacatacatgctctgccctgtgcatgccttctcattatgcaatgccaacgaatgtctcccagaccaccatggctcagctccaagaccatagcaccttatggtctacattgttttctttttgcaggcaaagcttcctgcttttatagaaatgtaacagcttaattaggacaagaagagacttttcttattttccagtcattattcttcagcttgcaagtatcaattagtatgcctttgggttgtattgtgttagttggtatgatttttaaaattgctcttggagttgctgtcttgggtctcatagaaaattgttcaatgaattctgggttgggattaggacagaatttccaatgaatttggaaatggccctaaacatacttctgccattttgtgttatgagtttatgtgaagcaatgtcctctgcactgagacccatgaaagcaaaataccagtcaaccctgaacaacactgaaggcaccccatggcccacagtaaatattcagccaagatttaattatttttataaaaataaacaaacacatcctcttatgagtaggcagaattcctttcatctttaataagtgccaagattaaatgtttgtcaaagaactgtttgggaaaactcatgtgtgatttatcatcagtaagtgtttgtgcatcactttatatacctgtatgtctgctgtcgtgtaaaaatgtactgtgcgaagtggggttgcaagtgagccaagttctagaaaccatgtgctaaggagtgaggtggcaattgtgagcccaggggagagtggccgagcaacaggtccaactggatgggaggtttgagaagagaattatgacagaaaatggagggccaccatgtggggacctccagaccaaatcattcccgtctggacttgagcctaggtactgctgagcagcaggcatgtgctgatagcaaacacaggggctttgacacagcccccttatggtcctccttcttcttaatgaagctttagtggctcccactggccatacctcctttccaagctccttagccactagctcagcctaactaggatcagaccatggcccttggaggtgtgtctgggcagcccatgtggatgtttggttcccctaaaaagagatatggtcctgttctttctcagggtacccagtcagagtgttgccccaagttgatctggccgtttaccttgtccctccctggtgccttttccaagtcctccctggccacagacctctgtaacaatgctcctctgtagcacaccctctcagggttgatggtagctttcactttctttactggactactgggtctgacaacatcagacctgagcagacagcttttcccagtgcacccttgttacccatagttccccagtcagacccaccacccatggtgctgatgctcaagagaatcttatttatttatttaatgtgggtccgagggagattgcatgtaaattttctgttgcatgtaaattttaaaaaacacgtttccgtctcagcctggtacctcagcccttgctcctggcttagctctgacatcagctgtcggaagtcccactcccgacttgtccgttcctcccagcttagctctgacaacagctatcaacgacccgacttctccctctgtcttcccacctttgatcctcagatgaaaatacttagacaactttattattttagaatttgtcaggtaacacagttgctgggcgcagaatctcctgccctaaccttatcggctatcagctagctcccgccaacctcctgtgccctaggtgccccaaggccttgcatgactgctgctttcttctccttccaatatatggctacaaaagcctctttccccccaaaacacacacagatacagacacagacacagacacagacacagacacagacacagacacagacacacacacacacacacacacacacacacacacacacacaaagctttcctgcttctctttttccttctcctgggacccagaagtcccacctgtccaacaattggctccaggctctctttattgacacaatcaagaactaattagggaatcagcacctccccctgcaggaagctacagtaacctcttgttccgcaagagccccaagcctggcttttactccagcccctcagatcttccccttccctctgctaccgtctaactttactcccactcaagttaaaacaatgtttctactgtgacattattgaaacaaagtaagccgtgagttagagatatgacaaatacattttgacactcacatatatgtccttgaagccaccgccacaatcaagacagtgaacttatctgtcactcgtagtgtgtctcctgttcctttgtctccttcctccccaaccagatgacccctggacaactccaataccatgggttgacttgtttgtccagaagtttagtaagtggagggctatttctggctctcaatttgcataattgaataatcatttcagtcccactgtttggtaagtcaacaaacagttcatctccactggggtgctaggtaccccacgtggagcctcatgctcacagggcagacaccttactgagccatctccctagccctggttttcttttcttcgcccccccccctcctcctttacctctttctcctctcctcctcttctttttctttgagacaagatctcatgtagcctggcttgtagcccaacctggccttgaacttgctgtgtgattaagactgacttggaagtcttggtcttcctaccttgacctcatgaatactgggattgttgttgtgtgccagcatgcccagtgatgtttagatttctcccaatttggggctcctccgaataaagccaccatgaacatctatgtaatctgtgcacacaagcccttgagttggggacatcaagggagcaatctgcaggctgacagtaaatggcaggggtcgggggcagaactctctgtgctctgtgcctggcccctttatctattaagcccgctgagtggtaaaagctgaatggccccaggtggtggaataatagcgtctttaattgttctccgaatgagattaacttcttatctgacagtttgacatctttagtgttattaatgcccaaataatgcattgttatttttataaactccatggtggcaaacatatttcccttcatttgaattaaaaatagatatatgtgttacctctcattaccccaggctgggtccctggctagggaaatgtggactgggtaaagagaagccacatccgcctgtcacctcccaagtggcctaaggggctgggcccaggagctagtcacttggtaactgcacatctgagacctctggtgagccgtgagctatgagatccaggttatctatgccccctgggatgatgtgtcacttccggctgttctaggtgctcctgaccctgaacattgttctagagcagtgggaaagcttgtcctgggtagtttgcagaaggatgcttgtcttattgtttttcctcttttatcctttcttttctctccgccccccccccctcctcttggactgtgggttctacctccaggtgacccatgctaacggaggactgggggagagcggggctgtactaaggtcatagagcccaggttctgtgttagaatactcagctgcagatccagatatctcagcacaagttatgcatttattctgagcctcagcttctctgaagtggagagtaatgtctgcctttccacaagtcaatgtaaacacagtggctgctgcccggggctcagcagagcccaaacgacatcatcagcggtaattattctagtgccacctgctcaaacgctccggtgggggtggggccctgtggaatgactgctgaagccggggtcaggaagctccaggagggaggactacctaccctcttcccctgctgccaggccccttggcacctccacttaccccagcgttagccaggctgtcaaggtcgataatgcctctgccttggaaatctggcgccgacgtctttatcaaagccaatattaattttcactaattaggagccgccactaatgagtgtcacagctaatttagctcatctgtaacccaggaacagcaccgttcttgggccaggctttctgagtcctggatgctggtgcccatcacttccctgcttcctggccgctgtgcaggagccaccagctgccagtgttgctgttcctttgagctgcattggctggctggccctgtggagggtctgttggcctctgcttccaggaagtgtttgtaccccggggaggggtcagtgtatgtctcagcagtcctgaaagcgggttctgaggtccctttgagaattccatcttattaggaccatacacctgcagagacgctggctgcatctggtaccttctttgcttccgtgaggaagccttcagagctttttccctcctagagtcttgggtcactggacacatgcttggagctaatcagagactggtacaagtaagggcctgggttctggaagcttagatccattagggctgtgccttggtttcctggagaaagtagtataatgtcttgggggaaatcatgccagcaaaacaaggtgtgtgtcggcgctcccattcctgctgtgactggatggtcttcattgctaggcttgctctatagatgctatccctttgagggaactgacctgcaaactctcctctcagtttctctgcagaggactttgctgacagagtcaagcaccctggctgtttccctggctgcagacagagatcttcctcccccagccccccaccgacacccccccccccccagctcctttctcccaagatcctaggagattctggataaatagtgggtaaacaggtgggcctctgccctttacactagggacgaacatgaagacctcttctccccaggcccttggggccattaccagttcccagcttgggctgggatgtggtcctgttctgaaccctggctcaggccattttgttgggctgacattgctccttccttctctgttacttccagttgacacagagcagccttgaccggggaagtcagccctcgaacactccagccccctgtggtaaacagggtctcctcccctctggccttgtaggcgtctgcatactactgaggaaccaaaggaaggccacattgggagggaattctatgtgtgggaggacttctgtccccactctcagttcttacagtacagctcaagccctagtctcagggagggagggctggggaggggaggacgtctttttttgcacttatcacctccaaaaagcgaccttcaggccgagccaagtttgggggaagtgccttcaggcgtgacagatttgactataaatcttctgcattaatgcccggttcccaaggtctgtcattctgtatgtcacgtgacaagtacaaactgtgcagggcccatcagtcaccactgggtccccacccccgttggctttgtctgaggccgtggcaggctcgggacaggctgtgaagaaaaagggtcgggcaaacctgctgatgccaggagtgcaggggcgaggaccgcaggtggaggctggacctcaggcaggcaagggctggtcacgaacaggatgccttcagcacctgggtcctagaggtaggtggggagggatatgtagccttcagtaggacccatggcaagtgaccttctgcctagggcccatctcttgttgccccatctctcttatacagctgccagaggagtcatttttatagtacaaatgaactagggtcatacttcccttttaaatcctcttctaactccctatggccaacagaataaagttgaatttctcagactgtcaggttggctttgtgggtgaagacacttgtgtctaatgacctgagtttgattactgggaacctatgtgaaggcaggagagagcggactccaccaagtttctctctgccctccacataacatgtgtgtcccccatcatgtacacaaacacacatatacacatacatgcacannnnnnnnnnnnnnnnnnnnnnnnnnnnnnnnnnnnnnnnnnnnnnnnnnnnnnnnnnnnnnnnnnnnnnnnnnnnnnnnnnnnnnnnnnnnnnnnnnnnnnnnnnnnnnnnnnnnnnnnnnnnnnnnnnnnnnnnnnnnnnnnnnnnnnnnnnnnnnnnnnnnnnnnnnnnnnnnnnnnnnnnnnnnnnnnnnnnnnnnnnnnnnnnnnnnnnnnnnnnnnnnnnnnnnnnnnnnnnnnnnnnnnnnnnnnncatatgcacatacacacaaacacatatgcacacatccatccacatccacacatacacatgcatacacacacatacgcacacatacaaacacatacatacaaaatacacacatatgcatacacacatacacacaaacacatatgcacacatccatacacatacatacaaaacacacacacatacatatacatatccactcacatacacacatactctaaactacgaggtctcatacctgtcctcatagctcatctcagggcctttgcagctactgcttgccagggtggcctctgtcctcctctgctccttgccctttgatactttgtctttctggccttcagtgaactatctctacccctaatagtgtgcttctctctgttactctctgaccacacttatttgcaacttcagcatttccctaggtgatcctgtgcgagcaagcagtgtgtctcagagcaccctttgcaaggaaagtctttctaatcagttatattctttacacctcggctggagatgtggatggtccagtggttaagagcgcagactgtttctcagaggagccaagtttggttcacagcacccacagaaggcagctcatgatgatctgtaacttgagctacagggggatctgctgccctctgctggaccacggtggggaggggggcacaggcacaggctcatggtcccgcgccatcctcatagacacatttaaaaaaactatatttttgtacctttcagcctgtgatggacagagtttgaccaattccgagatgcccactggcatttttcttattgtcctgattaaaaaaatagttggtttctttttaatggcaccagtctgtctgtttagcagacacattttccttggcctgaatcttaacctgtttttgtttttgttgttgttgttgctgagcaaactacaagttttaaaaggctttctgttctatgtgctactcataattatcattataaactgggctaaaagtggcaaaaccaaagaaaatagaaaagcccgtgctacagcctacacgatgggatgctctgaaatttcctctgccaaatccatcaactcatcaactttaaactccaccacccataaagtctcagggcaaaggaagacacagtgccacagtggacaacctcactgtgtgtgaggagggttctgggtgaacagaggtgagcaggacactgggtatacagatgcaataatatctctaccagatgcctcgcaaagaaagtgaggctcagggtgctccagaggcctgctgtcggggacaaagcccagacgagggcttgcatcacacttgatggcactggcggatagctagctgttggggtgacatcatcagggatggctcccagcctttctggctttaggacctgttcagggaatgaaatcttctggggaccttctatgaacagatgttggatctgctctagagacatccaagttggctttatagaaatccacgggtgggggggggggggagggcggggcctgcttgggaactttggcctgggattgacagtgacaaagaaggatctcagactcctagggagctagacccaaactctctttatccagctgtggtcccaggtcacctccattttctcagccagaggccagagcttggcttttcttgtggatgtgctggcctctcctgagtaacccagacccaccctcaagtcctctcagagcagtgctctgctaaacacacacgtctcaggaagcacacagttggctctagaggctgcagagcaccagccaaagggtgaggttagttgacttcttggtgcagtcattagtaggcatcccagtgtccataccgacagccctcagagtccgagctgaagagaaggggagtatgtgtgtgggggaagaggtcactccgattccaaggaaggaatcaagacctgagagcattgcatggtgccccttttgggggcttaggttagatcaaaccaaggcaactggggaccttgtagccaaagccagggcctgggctgccatttctctctactgtggtccttcagcaagtgatttggtaatgactaacctggatctaatcagaggcaggaggaagctttaaggctggcctgggaggcttcaagaagctactgggaaagaagcttgggtgagtctctacatcctcatctggaccaggacaggaggctttgaaatggggaccaggacatatgctgacacccccatcgggaaggtcccttcaatctgtggcttcctaactaacagttgctaagttttcgggcacaagggccctgccagagacctcctcccatctttttaatcccttcttcttccttcgttccctcccctgaatcacctctctctttgtacttttctgtttcttctcatgtcagttcttcctagactctgtaacacaaaggacgtcaaccactctactgctccccagctgcccgaagagctagcctaagacaatttattaatattctcttgtctaccacaggttgtgctaatgctagaagcatttgagaaacctgtgccctggaccatagtggctaatcaaggctaaggaaagggctgcacaggctgggaagaggctcttcttttcagaggggcactggtcatccccgtgctgggaccgcagaggcagggtggccagcagtggagaagtgaagggctccttgtttatttctgctctctttcctctgaagggactgagtccttagcgggagaagctcttcatggctggtgataggaagatgaaacaccttatccgtgtggaggaagcagagggattagaaagtagcaggcacctaaaatgatcagattatgacctttgggtattatatttggccccaagttttcttacagttaaatccaaagagagccacgcagaaatgtttccaggcaacagaaagtgtaccattcatcttcagagacagcatcccctgggagcatgtctcaagcagaaatggatcccctgggggctcaggacacagaactagtcaagtgggtggtgccttcagatgcactcagagacaccagatgcctgtcctaggacctggcattccaacatggctttgcagtttcccagttgcccacaggctcttgaggtctggggatctccctccaggctagggtagcccggggctcagtgctgcgtatgtgctaaagttgctcttacagccagcacaggtgacaccttgagtcatctgcccagtggggacccgaccagctgccacagaccctctgttcccagggggagcagactgaggacacagagaggctgtctgtctggcaatcgctctttctcagccacatgtggtgtttcaatcccttagcaagcaatgcagctgtcgtggaaggtaccagctggatctcagcctctcacccaaagttccctccttgccagtctctctcgttctgttcccagcatcccttgggcactgtctgccccagttctcacgtccacaaggaggttgacctttgtaatggcagtgatggaaaagaagagatacctgcccattccagagccttctccatcctggccacttcctgggtttagcccccttctgtagattggtggatttttatcttctctagggtgtctcacatccatcctacatgtgaggaggtgtgatcagtttctagttctgggtccacagaaagcaaaatatgtttggttggtatacaaatacacatcgcttgtgtttgtgttcccccacaagtaatacatatgggaacatccctccctccnnnnnnnnnnnnnnnnnnnnnnnnnnnnnnnnnnnnnnnnnnnnnnnnnnnnnnnnnnnnnnnnnnnnnnnnnnnnnnnnnnnnnnnnnnnnnnnnnnnnnnnnnnnnnnnnnnnnnnnnnnnnnnnnnnnnnnnnnnnnnnnnnnnnnnnnnnnnnnnnnnnnnnnnnnnnnnnnnnnnnnnnnnnnnnnnnnnnnnnnnnnnnnnnnnnnnnnnnnnnnnnnnnnnnnnnnnnnnnnnnnnnnnnnnnnnnnnnnnnnnnnnnnnnnnnnnnnnnnnnnnnnnnnnnnnnnnnnnnnnnnnnnnnnnnnnnnnnnnnnnnnnnnnnnnnnnnnnnnnnnnnnnnnnnnnnnnnnnnnnnnnnnnnnnnnnnnnnnnnnnnnnnnnnnnnnnnnnnnnnnnnnnnnnnnnnnnnnnnnnnnnnnnnnnnnnnnnnnnnnnnnnnnnnnnnnnnnnnnnnnnnnnnnnnnnnnnnnnnnnnnnnnnnnnnnnnnnnnnnnnnnnnnnnnnnnnnnnnnnnnnnnnnnntccctccctccctccctccctcccttcctcttatacccttgcagatgtattctccttccccattatctcagctcccagaagaaggtgccggcccttgttctccagccagagtgatcctataaaatccagtttggagatcatccccttgtccccacacctgtggctacagagtcccaaagtatgtttctagggagggggtaaggacctgagactcacaggtgggagggtgtaggaacagttgggtcgctcttaaatgtctctccacgtcgtcctcattaataactgtaatgccggcatcactcgctcttaaatagcctcatttatcaacaagcaatttgccgtggcgaggtggcagggacacagataagcagacggggccggggtgctggcaagacacctgccaagtcgcttcctctctcctcttccatctctcaggggaatgggaagaaggggcaccagcagaaagctgggaagaggtgatatggcagtctccatgaaatcagctcctctggatgccaagggcctggctggcctggccagggtacaggcaaggcagtggggatgcaggccagatgctggccctctgggggactcagtggtcatagtgggtcctctgtctgaactcctggagagcagttagccagccaggtacctacatgaggaagtatggtcaagttctaattatgggaccacataggtcaaaattgctcagttggaactcacacacacacacacacacacacacacacacacacacacacacacacacacacaaagtcctctgctgcttcctgctgatgcccttggggacaccttgtggaccattccttgtatcacctgtaaacatgagctgtggtggcagccttgtcgtgattcggatttttgcaaggcctgtatctgaggtttttccccatgagcacagtatctgctctatacattttattctgttcaggataaatgactgtgctggctcacttcacatcaactggacacaagctagagtcatttggaaccacagttgagaaaatgccaccactgcccggccccaacttgcttttgcttatggtattttatcatagctatagaaaccctaagacaatgactgtcagggacatgggcttagtctctccttgcctccacaagtccttcctgtgtcaactttttgaccttcttacctcaactgctgacatctgaagtagctgctatgatattccaaccaggttttcctttggggaggtcggaggggtagaacccttcatcctagggttgcctcctgcctcctgcccccagcagcctctcctgccacctcattggctgtctgtgctagaaggcttgcccacagccccacctgtctcttgaggctgggggctaggtggatggttttcccaagcctataggttcctacactgtatgatcaatgcggagtatcagagtcaggtgtgactgctgggcagggcctggcccgggggctccattgatcatagctggtcatagctggtatcctgttcttgtgatgtcctgactccatggtagagctttatgtaacaggaggtgccattttggtgtcgtatgctggggtttttggaccaaactggcacccaagaaaccacaattaagtctggttcatcttcctagaagacaaatgttatttgataatgagacagaaaaattattttaaagccactgtaaccatactatggcatataatatggaatttacatagcttttcaaaacaaccctgagctcactaaagaccagagccatgcctgtcctgcctctataagacactcagtaaaaacaccttgaatgaatgaatgaatgaatgaatgagtgagtgagtaggtgaaaatgaatagaatattatattcaaagtttttattgatcctttgtgaatttcacatcatgtaccccaatcccattcatttccccatccctttatatctgctctctgcccttgcaacccccccaaataaaataaaaaataaagacctaacaatccccccccaacaacaataccaaccacaacccatcctggaagcttcagtgtctcatagtgtgtccacagaacacccatttgtccacacatctttactggcaaatattcactgcagtgagtcattggtctggttagaaacctctggcttcttctatactatcaatactgtatcctcactgggactcctcttagctatccagttgtcgccttgtgttggggagatcttgcagctctggctgtacagggcaggccccttcgcacactccagtggctgttggggtgagcccactcaaagccctggatccgggcctggatggtagtgagctggtcagccaccagctctccagcacccaccacggccagggcgagctctccagcactgctccctgtagctcatccaatgctttggccaagaggtggggccagttttcctgctcccatgctgccctgcagggggcagagcagctctccttcctgccttagacagtgagggaaaaggggtggggagaagcatatctccattgcccacaccatcacacagcagatgaggggtgggactaactctcccggccaccagcgccagctctactgctacccaggtataatatgggctaactctcctgagtgctgcaaccagtgagtggctaggccagatctgcaaagcccttggacatcaccattggtcctaggtggcagctcagaccagggacatccacgtggcctttggtggtagtgtgagccatggacatccacacagatccctgttgctgcatggctatgcccaagacatggccctcagtgacagcatgggccaggactttatatccttgggtatataacagctcacatcaggctgttcctctcttctctctcgtctccagattcacctctcttcaaagtgctcatccattccacttctctttctctcctatctctctgtgatgtaccacagactcgtgcatcatagtggctcccgctgtgggcaggccacgtggctggggggcctctggatgtcttctaaatgtccatgccacaaggggtctgcctctttgggcctttgtcaaaagaggtacacgtttcatcctcaggggatgtttagtcaggaattactaggttagcagatggtgcggtggtgacccgatgcttctgagagtcctgaggagagggaaatggaagaggctgtgattagcagggagggcttcctggtggaggggcctggagttcagagagacaagatgggcagagggatgagtatagtgggttctcagcacgggccaggaagcaccacacatgagtgtgcgaagctgaaggacagaggcttgggtgcaggcaatgcgctttacagtggtctccttgatgctaaaggtttccttgggcagtgcatgccagccttcagcagaatggggcatgtgccacagtcttcattgtgtgcctggaaacaggcttgagacacaatgtccaccccacagtcatcagggatacaggtagatagcaacccgttctgtctgctccagctgtgacccatggaccacatcttagaccagactgtctaaaaagatgctctgagatgaggatcaagaagtgtgtgagtaccagagcaaggggacaaggctgagcagaggtaggagtggagccacaaggtgactgcagcaaaggtgtcagctgatcctctgggttggggcaggacaagtcaagacaggggccaagtcttttgcccttccaaccactcatcgggtacagactgtccttggtgaggagcaacggacttgggttagaactgtgatgtgcgccctccctgttagcagaagtagccctctggatctaggacaagtccccctacccaggatggtcctccttctttaattatagctgctcctccaggcccccaagttcacagtcataacttatatctctaaagtctgctgtcagagctagagtcaagagaaggacagaccaccatgccactcatagaagcacagtgcatagaaatatgtacatagttacatgtatgtagacacacacatcttcatgtttattggcctatgcataacataaacatgtctccagaaagatattcatggaaaccacatgtaacggttccttgggaataagacctatggaagcatccagctagcgaccaatgaccaaccaaggaagcgatgctacccaggccttgcttggcgagccagggtgtttcctgtggttatttatagaaatgtgggtacagcaccaatttactgagcatggggaagctgactgctggctactccagtgaagaagagcccccccctacttcatccccaagcaatgttaaatcacttctacatccttggggaggagaggggcctcgtgcacacttgcatagaggatgttagtgagcctggtcttgtgaggatctcctgcaggtaactgcggctgtgcccattccaaaatggcagcagccgcaaagagacctggaagactgtatgtttccacagtaacgtggttcttattagtctccggagtgattgttcagtctccaccaccaagatggcctgcatgttgaaggtgggctctgccacttcagttacccggttgcctgtgcatggctggccctggtgagagacagagagagagagacagacagacagaaagagaagagagcaagagtgagagagagagagagagagagagagagagagagagagagagagagcgctcagcttggctgtccagcctctttcccctctccttccttctcctttgcttctaaatgcacatgtgtgccgcccagagaccttgtgcaacacatccttctagcctggtcggctcagtaaatggcctgacctccccaggtgtcttctgtctcatagtacttggcctgggcatttgattgtgaaaactgtcctccataggtgcatatgtgtgacctcttggcccccagctggtggtgctgtttcagaagattttaggagctggaccctggctggagaaactgctctctaggaacaggcctggaagccctataccctggccctactttctgttcatgctgtttcctgactgtgaactcccaggcgacccgctgcctcatgctcctgcccccataccttctccctgtgatggaccgtgtcccttcttaaacagctccttccttaggtaggtttgtgccaggtattgggtaccaggacaagggacacacctaatacaaccttcctcattcttcttctcagtgcactgctcgctctgaaataccttatttggttgttttgagcttttgggttgattcaggtgcctccacgaagaatcagaactcaaaaccatctaaatggtggcccatttgagagcagggagtcccgccactccactcaggactttaaaagagtatttatttttattttatgtatatgagtgctttccttgcatgtaggtctgtataccatgtacatgcagtacctaaggagtccagaagggggcgctgaacccccggaactggagttactatgagggggctggaaactggacccgggtcttctgcaggagcagcaagtactcttaacctctgagccatctttcaagcctctcctattcagtcctttggtgttgtctccctggctgctttttctgtctgacacacacactgaggccacagaccagatgcttcattcctgttaattggggaatgaatgtccaagcagggagagaatgacgggtggatgagctggtaaatggaagtgcatcatatcccagacccagagaggccaagcgacttccagcactgtctgatctactgctcagggagccaaggttacatgataaaggctcattagggacaacccatatttagaaaagcagctgtgaagtctttatgctttactttgcaaatgatattaataatcaacatttgttgaacacaggcttgtgtgttagatgcccttcagtgctacatgcacgatcctcacaccaccttgtccagcacctttacaggtgaggaaaatgaagggcgaagaagcaatgtgactggctcaaggtcaccctccctccccccatctcagtctggtttgtgttgctacaatagaatgccagagactggatcatttataaaacagggaagtttattctcagagttcaaaaggacggggagttcaagatggagcatctacctctagcagagtcctttccctccatcagaatatggaaaagggtttcatgtcaggaccagtgtcctcgactgtcacatgggggcagtgaggtgagcggctgaggtctctttgccactgaacacaggactataggtggccttcagcttggtacccacatgcatccctatggggttcagtgccctcatgttctcaccctggtgcctcattgctctggaactgtagttccacttgagggttctttctaaccgtagggccctgggtccctctgttcccatgcttggagtgtcttccttcttcattcatctcctgaagcctgtggctgcctcaagaggctgccaaggagctctctgtccttcactgtgggcagtgtagggcagttggtgcccactgtgacatttcccaccccataagagtaggctcgtgggaaagtaatcttcccctgcctgtttggtgtgtgcaggaagtattggctacttggacacgctcctgccatgtgatatccttgaacactggtcccatgtgacactcatggacactggtcctgacatgaaaccctcttccatattctgatgcagggaaaggaccctgctagtgcatgttagagacactgctttgtgtggaggtctggaggctggggagatctggactagatggccaggaatgtcatttctaggtcttgggctgcaagcacagacatggagcgaacgtgattttggtcctagatacttgggatatggcttgagtacagcagccgctccagcctgccccacctgtcacctagttagtggacccagggtctcaagtcatgaaacagggagaggcgacttgacagggacaccttgagaaaagtcaaccaagtcttcactcactgtcccctccatggcagaggttctgtggtaagaagagtggcacagttcttccttcactcatctgttgacctctttatcaacccacctacccacacatttatctacccatattcttaaccatccatctatctacccattcacctacctatccacctgtgcacccattcacccacccatccacccgtatacctattcatctacccatctatccatgtacctattcatctagccatcactcacctactaatttacccattcccacccatctattcatttactcatttatacatccatctgtccatccatccatctatccatccatccattcatccaccagtccccacccattcatccatgaatccattcatcttttgttacccattcatgtggccaaccaccctttcatccacccatccatccatccatccatccatccatccatcatccagtcagccagccagccagctacccattcattcattcatctacccttccatcaatccttcgactcatttgtccaatcactccctagtttaagtcagtctggccccagatcgacccgttccaaggaaagatatccctgaagtcacaatagtcagccaagcttctagaccaatgttttctcaggtcatctttcttaaaccaccagtgttgtttgagatgaccttagaagaaaggttttcttgtccacacaaaccttgggaaagctgtatcttcctccaccgccatgttgaatagtagtgtaataatggtgataatggttctgagaggtcctgcagggaagactcctgtttagattctctttcgttttatcccttagaatatttacgtactggggtatgggggtggcacacaaggttatggtagttgtgaggaggtcaggggacaaccgttgggagttggctctctccttccgctgtgtggatcctaggactcaaactctggtcatcaggcttggtggcaagcctgctcgagccatcgcaatggccccaggttatttttctaatgcagtgttcttctctacatctttttgaccaaggaacatttttttttaacatggagtacccgtgagcctcccagggaattaatgattcgtgaaatacactttaggaagcattcctttaagcacgaaatctttttttaattataatgacttgcatggaatattcataagatctattatatatgtacctgccttctcccgctggaatgactcatccttcagcccttcctgggcacattgttgaacacatcaccctgagcagcatcctctagcgaggctctgtccctgacaggagctggggaagggacagaaatgggcgagcacagatgtgcttgcttctctcttctctgtgttcccccttggagtgagtcagaattcagaacacctaagaaccaacttcagtaatggaagctcaaacactctctgagtaaaggcctgaccagatctctcctttgcactaacttggtgtcttagttagggttttactgctgcgaacagacactatgaccaaagcaactcttagacaacatttagctggaagttgtcttacaggttcagaggttcagtcgattatcatgaagctgggaacgtaggagcatccaggcaggcatagtgcaggaggagctgagagttctacatcttcatctgaaggctgctatgagaagactggcttccaggcagctaggatgacgctcttaaagaccatacgtacactgacacatctacaccaacaaggccacatctacttcaacagggccacacctcctaatagtaccactccctgggctaagcatatacaaaccataacacttggagtgtcatataaccatttatttggttgtaggattttgagctattaaacagcctttgataattatttcctacatgcatccgttttatttatctcttggttggttgattgattgattgattgattgattgattatggtgctgggaattgaatccagagccttgcacatgctcagctactgttgtacaactacttatgccctgagccctctgcttttgtcaaggcagggggctccctgtatcatccatgttagccttgaacctacaaccccgaggtcctgggattacaagtccctcttcacactcagcttcactgtcctgctttagtcgatcctttggatcattgcacaataatcgttggggctggtcctgtcctgccaggataggaacatagtcttcaggatcaggttggcctagctttaaatcctacgctaccctaggctacctctccctagctgtgtgatcttgggcaaactgctaaatctgtttctttctctgagtgtggaaatgtgttctcatgtttggaatcagtactagatgaggttgtttgggcagagtacttaacggagtgctcggcatatggtaggtgcttgataaatagtggcaaagtcaggactaggtgaggcgagtgagggtcctagggcatgtcagcttttatgacattccaaactcctacacatagagaaacagcactgttagaggttagaggtcctgttagaggtctaccttatctcctctgtcttgggtacccacactgttacatggtctccaccatctcctggggatgctcatccatacctctagttgcttgtccagtctgagcatcctgaagacctactcagctttccatccataaagatcctcacctgggcagtaaatgagctgaatatggatggtgctcaggcacaggtggatggagggtgtggcagggctgaaggcaggaactgagaaaggcccaaggtcatcacacaaccatgcctcacacgagcacagacggctgtggagtcctaagccccttgccagagcctccgagtcagggcgaggccacctccaactgccctgaaccttcttccttctcttgcctgtcaaaacttttaaaaacacaaacagcggcgagagcggcatttgcataaatctcattagaaaaagtgcaagtttcataaatcttgtgataaattagtgcgagatcattctcaacgtgatgtattaattttagggcagaatgaatggttctgtgatcatcgtgggtaattgcgagtctcctctgaaacggggtgatttctgggggccctcctctggttccctggcaggggaggggctgggggaggtgtcctatcctgcatctggatgcccacatcttgttttttctgcttggagaggtgatgagaagctgggtcttcagtcagggctaaagagcagaagtccaggaagctacaccttaaggtctatattgccaagaaccaaattgacttcaagaaggatttgaaacaactgtatcttaggccatccatgaaagccatggcccagaatcatggtccaggaccagcatccttagcactgcttgggagttggttagagatggagccagaagctctgcagagaccatgagtctgctctacagatattctagtgaccccaaggtttgctctactctcagaagtctttgtgttaacctgagggagtcacccaaagggttaatgcattaccctaccctgcttgctggcaagtggggcttggcttgcctcacttgcgaacactccccaggtgatgctaagataaaaccaggtcaagatttgacgtgttaaaaacaaggtgatttggaaaagtctggccacaagaaggatcacagattacacacacacatgtgtagacacatattacacaggtatctattttgccatgcctgcagattggtgtgggagccccactatggctggggacccacccacaacattaggaatgtaggggcttccaggaggttggtctccttgtggaccaaatgaaaatacccttaaaggccatggtccccatcaaagccccccccagtggaagtgcttcttgagactctgaccctccaacatgcagtccttgtcccagaccatgaatctacccttagttgtaggacagacacaggcagtgtgactccgggtggtttgatgcctgtgagtttggaatcagttgttgcctgtgggctggccttcatcgtagactcctgtttgtcccagtgcttggggggtggggcttcagaagctacctggccctgaatgccctctctggaggtcacatttaggggtgtcaatgagggttgcatgcgtgccaccttgatcccaagagtggggactgagtggtgtctctgtcctgagctcctcctggtagctgggcatcagcagggtggcttctgagcaggaaagagccagcttgaacctgccactgtgtttagactatcttccgccagccttccacggcctgaagtgctgtttattttaatgataatgtcaagttcaatttgccgtcatttttccacatttccttttgtaaagttaattgaacagttcaatgaattgaaaagtttcaggagaaggggaaaaaatagctcactcttatcattgttattaaatctggtaactaccgcttggctctctggccttaagagaggactccatctgcccccctcctgcccccatccctcacacgcaccccaagttgcctcggaactgcaaggacttgagaaggtcagacagaacattctagaattccttactttctggtcatctcatactctacctgctgtttctgaacaggaaggaaaaaaaaagtcttcctgttccctgagtatggcatctttgaaattgtgaggggcatctaggcagtctagtttccaatgtcaagcattgacattgtgtgaggtgtgaccaacagagccttaataggactggttgtaatcatagtgggaggcgggggaatgcctggggaccaattcagatgtcagatgtagcaggcttagctgcccggccccgatttctttgtgagtttgttgggcgcatcaagaaccagaatgtgtggcaggtgttaagattcccctactggagtcaggtgtttgaatcaaagcctctttctcgttaagtaagttctgaggcagcccaccttaccaacttttcctcaggacaccctagtgctgtgggagactgattccaggtccctcctgatgttggtgatggaggagccagtcagagaggttagcatcttttctgatgtctcacacagcaagtggtggctgagtcgaaaccagggcatgcagaggtactctatcccctgctggttctgttttaaagcagagaatcactgaaggcagccctgtccacaaagtatctactgggctgtttgcttgtttgtttttccagacagggtttctcagtgtagccttggctatcctggaactaactctctttgtaaaccaggctggcttcgaactcacagagatctgcctgcctctgcctctccagtgctgggattaaaggcgtgtgctaccaccatcctggctatcccatcctggctatttactgggcctttcatcctgagtccaagccctcactgccctgaagatggtcactctgcctgtgtgagccttggttttcttacccatgtagcaggtgtgacccttctatgtagggctctcgttagaaatacataaaaaataaaataaaaataagtaaaaaagggttttaaagtggatactctcagtctctcccagtgcctgatgtgcgcaggtcttcttcccttaggcggcaagtgagtcaatcctccccagtgtgggcagtttcaggagagctgctcttgtgaatagaggtgaccctagggctctagacacatggccggtccctctacccaaggtgagagtttctgtgggggactgcagggtatgccttggagaagagccaggaggccttaggctacaggagggaggcgtggtctcaggcaatggccctctagcgtcccaggtggcagagatagaatttagaatagaataaggatcgagatgtcaaacccagttcagaattccagagggcagcaaacagggggagcctgactctggcggcaaaggggagggaaagctaagacaaaagagaggatggtgcctgacaggctgtctgatcccagagggagacaaatgggaccacaagctacaaggctggctggctctgaggggtgtcctgacccaggaaaggagcaagcagccactgtggctctagcagggagtgggctgggttcctatctgcgtgtgtgtagggtttgtgggtgggagtggggcacgtagcagctctgttggtcactagtgacacaagggtggcacaaatgtcaccaatatacatagtacacatgtgcacccaaggccctggaactgcggctgcataaccttaggagagcattattcagtaaacttcccggcttgctcttccctatgtgaggtgattggggcggggcggggtgtctgtggcttctgcttccactataatgctttctgtttctgaggtgacctctgtacccctaggactgactctgtctgtcctttctaactcccctgagcctggtaggggcaggcagctatatccttggattgggagagacaatgggtaccaattaatgtaaagtcactttatgtcacaaatagcaagaggctggctttcatgtgtcttttaaggatgatgatagtgactacacggagcccagcactgtgaaggtttctgcagttgagtgtagtagacagttgattactaatgtctgcatggaaaagggctgggtccaactagctctctgacctctaggtagttgatggagatgggggatcctgggggattgaaagggtcttaccaacctgctctagagcataagctgctgtgttcaagagtgatggcctgttgcttgctgcgcagagccagagaagctgagggcaaagaagcagcttgtgggcacatgtagaggcggtgtaggatctcagaggcgtgtagcaggatttgtgtgtgccatagtgtgctcaagaaggctggtagcagcttggtcctctgacccatggtgcaatggaaatgtgactggctagggagaattggggagagggttgtgcctgacttggcaagagcaccggacatgataagtttggacgccaggagaccaatcacagataggcttttggacactgctcctttacggcagagcgtgctcagtgcccttggtcattccacagcccctaccccaacttgggggacaggtatggatcacagccttctccttagataaaaactcaaaggtttacagcttgccaccaacctgcttttctgcccctcccctccccaggcaggcagagatccacagccctttctcttccagtgcagataacaacaataacagtaataacagtcatctgggccggcagcagggacccagcggggactcagggaagctgtgattgtctgccccttgcctggaaggcagatgtgactggctgctgagggcctgaggccaccatagaggacatgtccccagctctgtgcttcccagagaccttagctgcctgctcagggaatccctacctctaagatggggcagactgtcccagaataggacacttggttgacaggagaaactggacagcccttaggaaagaatccaaggccagtgtctacacactcccagtcatgcggactctggctctgatgttccaagcgttccaagtgctactgatttgggttttattaggtgtgattagccttgcgctctcctgcccattagtgtagtaattaagatctaactggctatactctcttctcaccgtggctccagggttcacctggggactgtttctctccccatccttcctgggcttggcaggactcatgatttcattgagcgactttgggatccagctgcttatcaggctaagggaatgggataggtaggctgctgctccccaagagctgacaggagtgtgcttggagattggcggccagcaaggcaggtgaactcacaggtggcttcagagatgagggactgtgaggacagagagaccagatgcccttcggggtgggtgtactgactgatcaagtacttgaagaaggccctgaggaggttagctgttgctgagaggtgaacatcaagccgcctgggcatgaggtgacttcaggcggcagtgcacaatctcagcacagctatgaacttggccccgtcaggaacagacaaggacaacgcggccaaagagcataaactatcggaatctgtcatgttggagaagattactagagccctggggtggtctgatttatttatctaactttaaaaacgtgtgacctagggagatggctcaggggttcaagcacttgctgcttaagcatagggacccgggtttgattccccagaaccccatgataggcaggcgtggtagacatcttgcaattctagcctcagaagacagagactggatccctggtaaagtgagaccagtcatttatctgagagctcggggtttgattaggagaccctgcttcagaggatagcgaggaagaaaggaagattcctgatatcaaccccaggcttccaacatacactgcatccatgcatgcacccatgcccacacgtgtcctcacacctgcagatagatatgcatacgcacacacaaaagggggagagatttaaatttagagtatgcacatcttggaatttatcccattactcagtgtgagactgcggttcagtagactgtgccgtctccagaacgtgccttggcttgaggttcatgactctgtgcctgtaaaacacgcaaaagataaagtccccctactccatccttcccagcctctgaacatcggcattccatttcacgaggtactggggagaagtgggattgtgtgttgttcatctgtcactgtatggctagcttatttcacttagcgcagcatctcaaggttcatccatgctggagcaagcaatcgtctgcatccccttctttcccagaactcgatgatccattggctgcccaggctgtgttttgcttatccatctatccgtggctccttgagctattccaccattgtggaaactgttatggctgtgggttttccgtggactaagtacctcagtttttaatgtccttctgccccaaggttagacagggccccagcctggctcggcacagagtggagctggctggctcagtagggtgacccttcccagcaagggagggaggccaaatgcagagacgccactggctgtactgattgagccaagaggcctgagtctgagccattaaatcatgccagacttggagcagtccctctctgcatctaaagcgggagccataaaccaggctgacttacgtgcaagcactcagagctcggttgtttatagccagcgtccgctcggattggtagattcctgtgctgcgcccattgttaaatatttgaatatgggtctgcaataaaccactctggggcttctatacatggctgcacatccgtctcctgaagagagaggaggggacactgtctaggagtttgtgtccttagcaccccaccagccagctggaccagcagcgtcccgcagtagcaagcattcaccatggctcagatgcacgcctttggggtttttctcagaaacagaccttgtgatggattgattgaggctggcgttcttgttcgtggtaggacgtccagtgattgacaggtgctggggggctctaatgatggtatgaaaggagcctgggtgattgtccacagcatcatagccaggtggttgactaaggggagagcccaggaaccctgggaaaggggcagggatatgaggcaaggaaggttggaattcctgccgctgtaatagagtaaccacacggactggctaacttataaagaagggaggttcatagcgcagttctggaggctggtgcccatatatggtgagggtcttcaccccgcatcatatcacgatgatgaatgtggtgagagagacaaagtgctagctcagggctatcaacttcttgtgaagccgttagtgcctttgcacgggcctcaccccgtctggtttctgactgcttcctgaaggcctcatcccccagtggcagcaattaggagataggggttagcttctaactcacaagctttagagggcacactgagaccacagcatttatctttgtcaccgtccacggcccgtcactgagtcccaacaccaggggtatcaatcagttccctggtccttctggcctgtgtgttgcatgagctgactctggcaaagaactgtggagtctgaccgttggaggctaggctggggtgtgtgctgcaccgagggagacacagtatcaactgaagctgctgtgatcatcttcccagcccctttcacaccatcatcagaacctccaggaactgtgaatccctggatgccctaccacgaacaagaactccagttttagccactgctggtgggaacagaaaatagtgcaggcaccatccaaggccatgggatgacgtctcaataagtttaatgtggagtaaatctatagcttagcagatccactcctaagcattcgagagacaaagtgaaatgagaattcaaacactgtcttatacatggatgtgcagcattcacagcccagagcaggaaataacccagacctctgttgatggaggagcctatgagcatgatgtgttagaagattcatcagccatccaaaggagcagagctctaacacagtcaccagcatggaccagtgatactatctgagagccacacacagggccacagactgttgttgtggttctgttgatgtgaacatccagagcaggcaggtcccagagatcaaagtgtgcagtctaggagctgagaagcaactttgtgacaggtaccaggtttcctccggggagatgatggaagatggttgctcaccgtgaatggatgggaggagaccaggttgtaccctttgaatagtgaaggtgcttaattttatgagatggttgctttgctcgtgagcacgtgcgtgtgtgcgtgcgtgtgtgtgtgtgtgtgtgtgtgtgtgtgtgtgtgtatgtgaaggggggggttcctgtagcccagactgacttcattgtgtagccaaggatgaccttgaactccagtcttcctctttccacctcccaggtcctggggttagaagcatgtactaccacacatggttcatggtatgctgggaattgaaccccaggcctagggcatgctagacaagcacgtgctctatcagctgatctgtaaccctagcccaccaaaactttttctttaaaccacaccaagtattctgcatccaacatcctgtcaccttcaggtggggaccaatggctatgtgggacatgcgcaccaccccagggtcttccagccaggatggtaatctggtaaagaatgatccggggggcctggggtagagccaagtcccacagacagacagacagacagactggatttctgtagggacggcatgaccaaagattgccagttggggcggcttgcctgctttccagagaagccagctctggtcacttctgcagagcagccgagagcaccaggcgggggaggaggtgcccagctggaaaactgtggggtgtcttgtcttaaatataatattaaatcagcacctttaattagtacgcttagaaaagccagtagcaattacctgggacaccaagaaggcgtgatctggaaagagcctgggaggaagccacaaaagaccattttgaacagcacataattgaagagaaaatggataaaagtccaggaaattacagggtgggtgacagcagctgatggccccatccctatcctgcccagggtccccctccctgggtggacccaagtgtcaggcctgggaaagccatttgggatatcaggttcagtcacacgaccttggctgcagggctgatgtagccttcccacaatccccttagccagccggagcctatcctcactgagccctctgcctgggtcaggacagggctggcaggtgaggcctgctgtctgaaggctgtgggctgtagatctttatactgtggaggagcagggtatgtggggagtccttgtcccctcaacctccacggaaaccaggggtcaaagctggaaatgcctgcacatctttagagtacatcttttaagaatagaatgtgtggtctgtttggctcccaattgaatctgaaaataaggtcttttggggcgggtgagcttgacttacctgcgattttcacacacctcatccctctggcttgggcaaaaaagggcattgaacttggcatgtaggcgttcagagcaaagatgaggtcacatctactgtccactgtacagcttgggtgttcgcttcctgtgtctggcttctctatatgtaagatgtggacgttgggctccaagctattctgaccttgttccctgctcttacaatgcccctcttactgcctccatcgccacaaatgctgtctgcctctgctgattgacataggagaagctatgttccttccccgaacctcaatatcctcatctataaaatgggtagaataatgattgccagatggagttgtgggaggattgaacgggcaaattcaagtgaacaggcaaaacaaacaaacaaacaaatccaaaaaagcttcccattttgggatcctggttggggcctgataggaacagatcagtaaaattcttgctcaccatggaagaattcttgcatctcaggttaactatggagtccagctctgacatctgttaaccacaaggatgcaagaaattatgacatcacgaggcaggcagaatggaacacgaagctccttgcctgcttctcagagctcacaagagtcggctgtcactgtcagcttagagctgtcccatgatcagcctcctgacagaagctcctgaaccacagccttacagtaccccccttccttcatattattctttggggctcttggttagatatgaagtcagtatttgggggaagagatggcgtctgtcccacttcgcaggttcagcaaagcccttaaaggaagtgggatggccctagccaaggcttggagatgctgctgctccatcttcccttcagaaacttcacactgcacacctggggacttaagggcctcctaaggctaaggtgaccagctctcccagacagcctggagctttggcacttatactagaatccccttcatcgtaggcagatggggcagtagactcatcctcttggaaaaccactagggagccagggagccccaggataagctattctgtgccaaaccttctgaaccaggctatgcaccaccatcctgatgcctacaatggcctgtgtccaatgcactgcgtcctgaagaatattacccctacttcttggtcctcttcttgaggacaggaaccagaccctgccagggcaagtcttggagtgatacatcttcttagccttggtgcacagatgaaagttggaatattttgcaaaatattatgaattaggcaaggtgtttctctttgtagaagatggaaacccaactcaacagaagtagggaaccaaagagcaaggaagggtatgctatagctggaccatccagaggcctgagctggtacctggccctgtggccatgcgcctccctcccagtgggaatctcctctccagctctgtaaactctgctagcttccttggcagcctcaccctcaggcatgctactcttgtgggtgccaagatggcccactcagcaacccaatggaatgagagtgttaagccccggagttagctttggttggctaacaggtggtccaggccagaagtggagagcctggttgcagcccagtgatgcttaggaagtttgggggtgatccttggcctctggaaaacctggaagtttgtgaggaggctgtgccccaaaggatgctctcttgtttgagcaagatggaagaaatgagcctgaccctctctgttttcttttcctctcctgttcaatcactccaggttcttctgtgacccagctgctcgcccgagacatggacaatgaccctttggtgtttggcgtgtctggggaggaggcctcccgattctttgccgtggagcctgacacgggtgtggtgtggctccggcagccactggacagagaggtaaggcattcgactcctgagtctcagcccttttctgggggacaatggaggcaggtggctcaccatcttttgggggaggaccctcttccaaggtcccattggacctctgctggatccatttgtctcaatggtagttctcttccagggctctattatacctgggactggactgggtcagatgggagtgttctgagccaggagtagcattgggtaagcaagagggaagtggccatgaggccatctcttgcgtggggtggagtagtctaactacccctgcagattcttctagagcaacaagcatggtcgtccttagcaaatgaaggtttgaacacatccccaggccttgtcctctcccttgtctcaggacatggtgacagaagtgtccagtggtttgctcccacatcctgcagacacacagagacacagccaagaatggcacccatgattcttgacttagttcactcgccatcatcaggattctacacttgcttccccaagtactgacaaatagtgctggctttttagggacacctttggataccaagcccacataaggtcctgggccatgctagagaccacgtagccacacccagagcctctctaattctgttctctccctccctctccatttagactaagtctgagttcacagtggagttctctgtcagtgaccaccaaggggtgagtgtctcttgaagccctgttgctctggaaaggctgtttctggactcctgaggtctctgggctaggtgggtgggatgaggccagaggggagagacctggttgagccctgtacatttctccccaggtgatcacacggaaggtgaatatccaagttggagatgtgaatgacaatgcacccacattccacaaccagccctacagcgtgcgcatccctgaggtgagctctttctaggtcttgtgaggggtcagggatgatggtttctgggactatggctgttctccagtctggctgggtagtatgtgccgcaatctctgagtacaagcagacggaactgtctcctgttcatactctagctcgggttctacttgaggttaatgagagtcacccatcctgtgggctggtggatagagcctctggcctgagagaaggcctatctacccctcccccacccaccccatccccaccccccggcagagctcacccccacttggagttaataatggatcaggagctgggagaggcaagtgttatgccctctgtactatctgcgcctgctgggagtcttagacagggcatacagacagatcttactgcagacttgcttgccttggccagaatccggttccggcaggactcaggaacttgcaggtccctatctgtgtggtctggcctgcagtctcccgagcttctgttctgtgtactccggatatgtttgcatgagtgcatgtgtgtaaaatcaagccatcgctggtaattgagaagtacaaattattgtattacaaacggttcgttaataagctggctcccgatggcaccagggctctcttcgctggctgtccctcaccacagtggctgatggcagtcttaagagctggtggttagctatgagaagaccttgactgaaactgataaagagcttctaactgggtgtccctcagtcctgcccccagggctgaagctggggaggggggggcaggtggcagcagtaagagccggggtgagaaggatgaagataccctggaagggtaggctggcacctacatgtgtcatctgtcactatatagtaaacaagaaaaggcaagaattccctaggcttaagtgggagagggacttgcccaaggtcacaccgatgtaacattgaccctaacccctgtggcagcaaaaattccctgaaggatgaaggggtcttgtctcatattccagaggtcctggctgtcaccactcagtggtaagccaagggtcctacacgtgtaccagttggaggatggaaggatacccgtatggctaggactgcccagtggtgcctgtgccccttcctcacctgggacaggatggcaggagagagagagagagagtgagcccacattcattagcatgaaggggcatggtaccctgccatgcctgtggacagcagcttggctcctggctctagctcacttggaagtgcccctaattcaattaagggcctctacgtgccagtctgcgctccgagcctggactcagaagccaagggcatggctcagagttaatgagccttgtgcccattgctcagctgccgtcctggcaggcccggctgtcctctgtcctccctggagagggaatggcaggcaacagcaggggcgggaggacaagcagtcctgtcccttcctccctggcccttgggctggaggccagttctttcctcttgcctcctgcagagatgcagcttatagaataccacccctgtgagaaccctaccctggggtcctccaagtctcttggcttcttttgtacattcaattagcaaagattgtccagtgtctgccctggcttggttctgtgtagctcccattctccagaggcctgagaggctacattagcagagactgtaagagctcaaggcaaagagccccaggaaagacccctgcccaccattgtctttaacccttctgggcctagtcttccttgtcttctaagaatgaagacatgacacagagacctgctgaggaaggctgctccagagggtacacagtgctggaggaaggcctgcgcaatttctttggtcactctgtgtcctgaaatttgatgctagctttgggtgcctccaactagatggtatcagctagatgaagatgcagccatcttggcatggcccagcctgggcctggtgtggtcacctgagctggaactgagctacttggctcaagctccagctgggaaaccagcacaggacctgttggcctctggcctggaaaggaggcttgaattctctgctttcattaacttgtgtgtcccctggacatgccgtggtcctctggagaggcaaatccaatggtggagggggagccctggaaggggagcagggggagactgtagatgtgatggggtggagggaggggcaggtacagcataatcctgctggaaatgagtacctggtagctaccaccgtgactgggatttcccaaggcttcctggaggaggtggctttccaggaggaaggacagtagagataaggaacctagcctctggtcctgtcatgcaaactgcttgggtaagactttatatctgccatagcctttctgttggcatgtgtttgtttgtttgtatgtatatgtatgtatgtgtgtgtgtgtgtgtgtgtgtgtgtgtgtgtgtgtgtgtgtgtgtgtttgtcggggtagatgcagctgctcacctagggactgaccaggatttggcctaccaagattctaagggtggagcctagcagggcatgctcttttcttcctgggattttcttatgctttggagatagtgggaaaattcctagactgcatccatccatccactcaactcctctatgagcatttaagacactgtacccttaccttcctaacctcagtgtccccaactgggccctgatggtaactggtctgtgtggtcagaatagcatggctattgagccttgccagtgagttccccgtgccaggaggcatacaagcagaaacaggaggaccatgcacttccagacatctagcatgacatattagaaatggggtgaaccagggggtcccccagtgtcccagcagaatttcctgggagactgctcagaggtgtcgtcccagcccctgtgattcggcctcagtagaccaaggagggccagcctcgggaactgattttgtatatgggtgctgcagccagcccatgcttaggcaagcccatgacccattgctgggctctgtccatcctttaaattttttcttttggacagggtcttgtgaagttacctaagttggcctcaaatatactctaggcccatgccaccatactagggagactagaaatctgcaagctggtgacaatgagcccagctagggttaggttagaaaacttcacagagtgaccacgagggttcctgagagctgcctagctgactaggaagaaaccctttatccacccacgatgcccatggggacctcagtctctgaggtcaggaatagtgaagtgggaggtacttaagccaaagcccaaccccctccccccagcctgcacagccctgtacctggtacctctaagggtccagcctctctgccagccgggagaaagcagacaggtgtgtgtttgcgtttgtttgtgctgtcttccttcctgcccactctcctccccttgctaagcggctctccgtgtaattatccattttatcagggcgaaaggccctgcaattcagttgtcgaagctctaacgagggagctcagatgctttcaagtctgtaaagaaaagggaaatccggctcgaattggcaacttaattcaccaagccagcctcgacagacctcattaagcccccgtgtattcatttcagcctaatggctgtcacgctgactgctgtttgatttgctgtaatagacttttatggcctgccaatttgctcaaacgtgtttgcctgtgtctgtgcccagcagtactgctccactacctcggtgaggggcccggcctgcctcgctgaccttcagagctgcccagcccgctgctctccggaggccagttctcagtcctgcagggcgccgagggaggtgaccctgatgctggggtatttgggcaggagggtaggtgtgaggttagaaggcttaaagggctgatggcttctgggacaagcaattgagagtcccctggagtctcagggacaccgtgtccttgatgtttgaacaagtagagcctcctcagctgggcagctccagcttttatccatctggttacaaggtaccttccacctcactcgggtgactcctctcaactagagatctggtacctccagtctgcctgcctgcctctctctactctcataaaccgaactcattaaagttcaactcaattgagccgtcaaagcccaggtgggatctcgcagcctgatctccaatgcgccttttatttttttcatgcatacaacaaacatttttaaacagctactgagcgggacccaggattcttaggcatcatggacatgcaggggaggaaagtggattcccggactttccagtcatgttgctttgatgagcaacttattctctgtattcatacctctttctcatccctccctatactccccatgtctcatctgtctgtctgtctaaaagggctttacacgttaggcaagtgcgctaacactgaaccacacagccagcctttcatttttgagttttgaaacagtctcaccaagtgacccaggctgactttaaccattccatcttcctgcctcaggctccagaataactgggattacaagcccgcaccaccagacccagctcggacctctgtcatcttctctagaagatagaggatgaaatttgccatcagtaatatcactgggcccatgctaatgtaggtgggaggagttcttagcctaaacggtgctgaatggtgtgagatcttcatcctcagggaaggtcattttatgaagagagaacccagtgagtggtgtctaaatgtgcctcaacttattaaatgccatgacagctttctgtgtgggggctaatggaagcatgtggggtgtgtggggtgtatgtgtgtgtgctaggttctagttggatgtgtaggagttcattagagtaggtaactaatatcatgtattttctggaatcttttgttatcttcctatatactttattactgtgatgagaccccatgaccaaggcgtggactcaccctatgaaactgtaagcctccattaaatgctttcctctgtaagttgtcttagctgtgggatcttggtgcagcaatagaaaaataaacaactaaggcaggaaagtgagtccctggtcatcacagcagggagcatggcagcaggcaggcagacatggtgctggagcagtagttgggcccacaaataggaggcagagagagctaactgggaatggtctgagcttttgaaacctcaaaacatgtacccactgacacacatcatccaacaaggcgaagccttctctatcaaggccacacctcctctatcaaggccacacctcctccaaggccacacctcctctaacaaggccacacttcctaatccttcccaacagtcccactgacagggaaccaagcattcaaatatatgagtccctaggggccattctcactcagacaagcacactgggaacatgatgctaggatggttgctcttgctgtttccattctggaagcagggctgagaacagaaaggctcagcgttgccttagctagaaaagacctgaaggaggaggagccagacttggtcttaatcactttgggccagcttcttctcttccacctgtggagtagaaacattcacaccctattctttacatacactctcaaaacagcccaaggaaatgactgtgtgcaggcaaagtgctcagcacaaggaccaggacaaacatctctggcacatggctaggctgtgatggttaccatctgtattaactgtctccatgacatagagcaagcatgaagcttggtcagctgcttctgctgagtaccaacccaggccctggcatgggcatggtgcccagtgagtggctggccacagctggacttcacaatgggcagcgccatgtcacatatctggctagtggcgctcctgaatatggcaggagagtttatacaggggctttgccagccagagtgtcttcccaatgtggatgtccctttatggtgttcatatagatgtgaggagcaggcatggcattgacctgggatggcagacccatgcataccccaccactcgtttccccctataatatcaaagtagttgtgttcaaagctggcggcctttggtccatggatctcagaatctccatgcagaaatgtgtagggagtcatgaattgttgactgtgtgagcccagagcacgtgaggacccaaggaggccaacttcttagtaccccagttgacctccatgccttcagtgtgcaagtagcagtaaatgatttatgaactgcatcctcaggttgcaggggctaggggtggggctccccctggcataggctgccaccccctccgaggtgtcagttttactcacgatagtgtcgtctcccccacaccagggaaggcagtcccttgacagaccgtgttaatttatatgtcggggctatggtgcctgcggccccctctgcatctgtaaccagtgccctattgatctgggagagagagagctataaatcatcttggcctgggactctactggccacagtagggcagccacctccccaagaaggcagcctgcctgcgatgtctctataccccaaggctctcactcaccctcccactcatggatttggtctcctctctctgtcagcacagtgacagatccctgggactctctctctgtcagcagaggtgcatgccacaacctgtagcagcagagacagcaagccctgggctggcagcagagatgccccttgtgcacccagctaccgcctgtcctaaggatgaggggaaggagggagagaaggagggggaggagggagaggaagaggaagggttggaggaaggggaggaggaggaaggggaggaggggaggaagagcaagggggcaatggggaaagaggagagagagggagggagggagagagagagggagagagagagagagagagagagagagagagagagagagagagagagagagaatatgagagtagagcacatttaaatactcccatcaggtcttgggagacagaggctcaatgagtaaaccctgaatcctgattttgaatccccaatggacacgtaatgctggggataatagactatacctgtaatctagtgtctaacagtgagatggaaggcagaggcaggagaatgtccagaagtgtatgggccagctagccgggtgtatgtgaccgctagcacagagaccgtgtctcaaggtagaaggcaaggattgatacccaagtttgtccccagagctccatacacgcgccatggcttgtgtacccatgcaggagcgtgtgtgcacacacacacacacacacacacaaaggtgtgtctttccctaagacacttcccccaacaccacccccccccccccgctctcattcatcttcatgacgaccctgagaaagagaagactcgagttttacatttatcgttgaaggaaacaggggccaagacgcatatgcctgctgacttttccccacgtccccaagtgaagtcacttgtacaacacgacgatctatggcaatgtcctctgggcatgtgtgcagtctgccccactgtctccagcaatgtcccactcctacaaggacttccagcaccacccactcacaacatccttgtgtgtgtttatgcacctttctggtgcctgcttgtgattgactgcaggctctaggaatgagatcctgattaggccagaatagggaaaggggccaggagcactgtgcttcgtgtctttgcttcataaaggccaagctgttttcatattttaacacaagtcaacagggtctagtcacaaattcacccagagccagctctatgcaagaaggcccagccccattggtgtcctcctgaggctggatagtcatagtccttgtgatgctcttgggctagtgggccagtaggtacccagaggctgatgctatttcagctgtcaagtagcagtataggtgagaagtaggtgactgtctccccacagacttgcgtccatcctgtcctcagccacctcctcctgcttcttagctaccaggaaggacaccagtgggccccagagctgagcccagggagcttggcccagacatactcagacaggttcctgactctctcctctgttcagggaagtgaagtcgggattcccccaaggcccatgtatgaacctctcgctcatgtatatgaagcatgaccaggctcagaggtacccttcctgcattttccacacaaggaaagagaacaccacaagatgaaaggaaccaggtgtcattaaaatgactattcggttttaaagacaaataacgttttcagtgacataatttctttgtcagttctagctgggagtccttgggctcatagaagtttctgtcagtggccacaagtcccatactgagatacagaacagaaagcaggggcttggggctggtgagatggctcagtgggtaagagcacccgactgctcttccgaaggtctggagttcaaatcccagcaaccacatggtggctcacaaccatccgtaaggagatctgatgctctcttctggcatgtctgaagacagctacagtgtacttacatataataaataaataaatcttaaaaagaaaaaagaaagaaagaaagcagggactttgcagagccacttccagggctccagggatgctcgggtatgtgccagggcacagtttactgcctctcgcccttccaataatgacccttgatacagaaagtaagggaggctgcatcctgatgtcccaagcttggagtccagctgttgtctcatgtgactttctatctctttaatggtctcttccactctcacatgggcccacctggctagccttttactgtggaagacctgggtagggctgactttaaaaatactaggttccaggaggccacaagaaggagcagccgaggcatttctgtgtcaggagaacctgtggctggctatgtcacagatcttggatccctgctggggcgcctcatgatggatttataaatacaagtttttatgccaagctgggtggcccagtagccactctgagcctctgtgtctttatctataaagctggtgtacatggagttataacaacagttcagttggaggcacaagggtgacctttgactatacctctgactgtgaatggtccaagagaactcaggaggtttcctggaaatagagtgagctctccagatgggctccattgccttggccaattggtggtatcaggggtcagtggctggaagccgagagcccagtaggagatggaaaatgtagaaactctacattggaagacatgggtagggggctggagagatggctcagtggttaagagcatcgactgctcttccaaaggtcctaggttcaaatcccagcaaccacacggtggctcacaaccatccgtaatgagatctgacgccctcttctggtgcatctgaagacagctacagtgtacatacataataataataaataaatctttgggccggaacaagcagggcataacaagcagaggtcctgagttcaattcccagcagccacatgatggctcacaaccatgtacggctacagtgtactcatatacataaaataaataaataaatctttttaaaaagaaaggcatgggtggggctggctgtgtaggtgtgaagacaagagcttgaatacttagaacccacataaatgccgggacggcacggtgaccatgtgattcttgttgggaggtagacatagggatcccctgagcaagctgactaaggagactagacaattggtgagctctggggtcaagagaccctccctcaatgaaggaggtcgaagagagatggaggaggattccaacaacagcctcaggctcccacacgtgcacacacaggttcacacccaccccaacacacacgtatacctacacatgcacaaaacatgcgtgcacacgtgagaatagtagaagagggactggtacagtgaatccctataaaggtggaaggagagaaccaacccctaaaagttgctgtctgactatggccgtgcacaccatgacaaacatatacccatccccagtaaataaataacacagttttaaaacactaaagctcaggggctggtagacggctcagtggttcagacagtggtttgattcccagcacccacgtcaggcagctcacaactgcccatagctccagcttcaggtgatcttaacaccctcttctagtctctttaggtacctgcacatacatggcacatgatcaaatgggcacacatacacatatgtaaacgtaaaaccttaccaaagtgagatgggaaaagttggccatgcctacagagaagtaacagggatgtcctgtgttcctatagactcctgtccctaagagttgacagcccatccacacattctgtaggttgtcagtactcccttagagtgtcaaagtcttgttcaaggccatttcgtcgaggataaagctctggggatggggctagtcaaagaatagtcttggggattcagcatagaggacatgtgtctgaagcccattcattcctgggccagaggtctgttctgtgtccccagccaagacagggtggtgctgcccctagatgctggagttggggtagaagctatatgaaggtacagggtgcaggtacaggtatacatgatgaacttccagtgagccatgttctgcctgtcccccggggtgcggggacttcatctcagccgttatccttccacttatcctaacaagtattgtcaaaacagcttggggacaggcccacagcccccttgacactgagccccttagcacaatgggctgttttgatggttttgccagttgcctgaccctccttgtttcctaccaggaggggacagcactctggcaggctttctgcaggcggattagtgtaatttctctgattccccagcagcctctaattactttgtaactttgtggtgcttgctagaagtgggagggactgggctttttctctttataataaccttaagtggaagctgcctgtccgtctattaaaaagcccgctcctctctccagatgagataatgccgcagggagatatcgcccctggcataatcactaggtacaatagaatagtccctgcctgctctctccagcatccattgacaaccctcctccccaagacagggactgaggagactccaggccaggtcacgtccttgttggagagggcacagactcaggccagttccctctctgaggcttggcccaaagaaagggggatggcacagagacccttgtagctgctgcttctctgtctagtcctgagcagtagcccagctgcagtcctgcctttataataccaccaagtctcagagagccgtgttagcataacaggctggggtgaggtgggagaacatggctgtggctgtccttctagactgtgtggtcatttccccaatgcacggcctctgttcatgtgtgccctgtctaagagacagtctccaggtgggcagcatgtcctctgacaaccttttgtccaaacctatgttccctccctagaatggagccgccagagatgctgatctcagccatcttttgcctttagcagtatccaagagcatccatctccagatccttctcttgatctaatcttggggtgctttctcattgccccaaccccagtttccagcctgaccctggcccagccttcccattgggtggctcagattcatgccagcaggcaggcctgcctctcatagcctcctgtccataaactcaggcgggctccctcagcaagtcagggagacacctcctgagcaggaagggatgacgacctcaccccactcgtggccatattgcttttccggagctcttgccatcagtctgtcatatagggctctttgtcctgcgtctgtacctcacacagggctacctccccaaagttgacatttgaagtgtaatctctactatgagagagccagaggggaccctcagcgcctgtgacatttgaaaggggactcaggaggtagtaagtttctgtgagtcgacagggtggagctaggattgagtccttgtggcttcttgggaagaggacagtagagatgttcatgtgtgcactcatgtacatagatatgcatgcttagccccaaaagaccaccgccacaagtgggcttttgatctctggccagaactctgagcccaaatgacttttttttttctttataatgttcccaccctcagctatcctcagctatttggttatagcaacagaaacagggtctatgtagtagggatgagtgtcgggaagatgtggaatgtgaagccttgtgggagtggcacaggtcactcactggtgtgctctgtgccaatgtgttactaaagcagctccctggagaggtgacaacttctttcacctgccggagtgcttaccacgtacaaatattcaggaaacaggcctggccaggacctcacagttcttccaactccttccctctcctcaggtgaccttgatgtctgtttctggggtgcactgtgctatctcccactcatgcctttatacgtgtacctattagggttttgttttgttttgttttgttttagatagggtctttattccccagcctggcctcagactcaaaatctgcccgcctcagccttcccagtactgaaactaaaggtgtgtaccacgatatccagggcttctctgtcaggctttctttttagtattgcctaagctcctgaagacagacaaccaagcctctcttgggaggccactccccacgatggggaggagaactatattaggagtccccagaacaggggtgaagctcgaatgctggctacagcatcagcagctctaccctggaatgtttgctgtctgtgagcccactaggcaaaaaaaaaacagtgacatgagaaatgcctgtccagaagggcccagacaccctttctccagcttaggagacctctgaaggtccttaagctgggtaggaaactgatggagtggaggagaaagggggaaaagagaaaaaaagcctcaaagcagttcttaaaattagtgtgaaaggtggattcccagtgatatagttagggaagcccagagaaggcatgcaacttgtccaaggtcacacagctaacactagctctcactgtttttgctgtgccaaaatgagtctgcatgcatcttgtccatgcagcatccactcagggtttggggtcagtagtaaggttttgctgtctctagggaacagccctgagtcaggaggtggaaggggagggggagggggaggattctttgaggcgactcttattgtgttccagcatcttctgcctccttccaagttgccgttcgtttgtatcagcagcccaatctctggcctgcatgagaaaacacaaaaatctttaaaggtttcttagaggttgggatggattttttttttctttgctggtcagggctggggcaggtggaggacagaggaattaattcttgtaacacattgtcttgggcctcactcccccccccaaaccatcaggtcttccacacccaggggctagcacaccccaaaagaattgtaccaaccacagccccgaaaatggagatggaggccatgcgtcagcagtcactgaggcggaagactctaaatggtgtggaagtaatgtttaaagtgtgccgcgattacagacatttccaacgggccgcgggcgacccgggcggcgccgggggctgaggaaataaatcctcaagtgtggggcctccgagagccttatggctgttgccaggcacaggctggtgcagggagcccctggtgcagggcagaggtgggtagtggggctcattccccatccatccgggttgctgggattccaaggatgggcagcagcctgtctcttccagctggagatggagcacagtggtgtagtgcctcacacacatgagagggagagagagagagagagagagagagagagagagagagagagagagagagaatgaatatgaatttgaccctggtgtgctctgtcgtctaagcttttagagttctgcctggtttcctctgagttcagaactggccaagttggtcaaggggaggacaccttattcaaaagagcaagcatcatttaaagatgctgtaggcaaaatgatgactcctaccttgttacctcagctggccacagggctttgttgatgggatggccctgtgtggttttcaggggatgctcagagaaggggtgtgtgtgtgtgtgtgtgtgtgtgtgtctagcttaaagatggaagtgtcaaaataccatagtgatacccaataccttgtaccttaattaaaaacataaaaaaaacatataaaaggatggacacagccaggagctgtggaatatacacataccagacaccagaaaggtaggaccgagatcctcttgagaccctctgaacaccctgcccatgggatgattttaggccagccagactccctcggagtctctgaactctagaactcaaagatgataaatctgtgctctgctttaggtcactaaatatggaataatttgttactgcattcataggtcttcagtatagaggtctgctctgaaggcaaagtagtaagaaggaaggcaggcagacagggagggagagagggagggaggaagggaaggaaggaagatgggtgactgtagcccacagccccttgaagactctagtaggcttcatccttaccctcaatgacactctttaaaacagaaattgagacttaggaccttgggaccaagaagccaccacttggagtttagctctcaggttgttgagagaggggcaaggtgggcagatcatcagtccagtgctagcccaactccatgccactttgacctggctcccctgcccttgtccccgctgtaggggctgagcccaagcatgtcttcctcctggtggtagagatgggttcagcagctggacctgagcttgggagattggtgccacctgtaacagcctcaggggcagtacagacatcgatgggcaacagatacggggcccctcctgatcacagaacctccttcctgagggcacaggaatgcttcctgctgagcacagggccccctcctacagcaatagggcccccttcctgctgggttccccatctgcaggtagtggctgaggtatatagagttcccaaagatggaatggctgccacccacagggcccctctctttgaggaaggaggagcagggcccactcaccatcacctctagactttagccagcctctgttcccatggcttgtctcacacatagcatattaggacttaccagtgggttgaagataataagtctgtctaacaatctgtaaggaccaagtctaggagtcctgggtatagggaaggttgaataactgtagcaatgatgttcttcatctgtttatgtccctgccacagccagctgatgacatgggaattgcatcttcattgtgtagacctcttcgagagagtcaacatctgggtcatagcaataggcttagggttgttcccacatctaagctaggcactgcctccagagagaccaaattagctacttatatcacacagcagacctgggctctagagccacttactgcttcttgtgggtcacaggcctgggcagtggcatgggactcacaccacaccagggaaccatgcccggggttcccaaaaacctgcagggatagccagggtttaggagatagggttcccccaagcctccctaagagcctttcctccaggactggggtgctcgatgcctcccccagccccagagagcctgcctgggaatgtgttcctggagagattgctctgcctatgccagcgtgcacgcttgcgcacacctctccgggtgtcctccctgccttcttctgtcccagtgtctctctcacaggtcagcgccccagagcgttaaatcatgaacaaatcggctgcagccagcaggagggtaagaggacagagggaggggacgtggccagcaaggccattagcagtgtgctggccaggcggatgagtctcggctgattggaaaagtggctggctggcctcctccttcgaacacggctagtccgaggcctctatggtaggatgtgtctgagacacgtgaggactgtgtgcctttctgaggattcatggaatctgcgtggcttgtagccaggacacccagtcttttttttctgtcacgagcacagtgttcagatggacccagttcttccccgaccagtaagatttggaaatgtgtcctatgaaagagaaagaggagaatacaacacccaaattggtacaggtcttactgtaaagtctggcctgagccaccaagccaacaatttagctttgctggccctgatctttctcatcttagaatggggacagtcacaaaccttccaaagattcctgtctgtacaaaacactcaagcacaggtctcgcctggctacagggagtgctctagaagctgaggcgggcttggggatccttacacgacctttgtggtggtttgagtaagaatggccctcctatgggctctgcagttgaatgcttagtcaccagggagtggcactgttttaaaaggcttggaggtgtggccttgatggaggacatgtgtcactaggggtgggtttgggggcttagagagagccagttctctctcttcctatgacctgtgatctggatgtagctttcagctactgctccagtatcatgcctgtggccatgttccctgccatgatgataatggactgaacctttgcaactgtaagccagccccaattaagtgctttcctttttaagagttgctctggtcatggtgtctaagacaaggaggaggacccctaaagagtaaaggagacaatcttgctgatgactctctgtagtactggaggggtttttttggtgtgctttttatcgtgctggacctctgtttactaatctaaaaagtagggtagtagctttctttggctatggcaataaagagcagagaggccagtggatccaaaatgatagaagacttagggactgagttccctggtcctgagtggccaatgccagggcaaggcttctggataacactcccacacccaggaggaaatagcacccggcattcagatagggacagacattatgaactgtgccaccctatggggcctcttgggacttggattatagtgttcttacctaacaaaggtcatgggtcagtcatgtcccagtggccagtgaacttgagcaggacacatgttggtgaacttaggttccagactccagaatactctggctttacctggtgctcagaacaagcacctctggtactgtaatccacagggcctgataggggccctcagccgggcaggtccatcccttctgcacggctggtctcgaagccggcctgcagcagacacggcttttttgtttttggttaaaaagcctcattggagcgttatgatattgcaatgtgagggtaattgagctgaaagctattctcttcctgcagccagagcgataggcgtgattgaggtgccgggcctccccagcagcctggggatcctgaccaaagtcccaggcagaaacagagctgtgagcaaagagggccttgattctgggatttggggactgccaggccgggcctctcctcactaggagcagacggccagggtccctcgtgggctggtacaggcagagggtccccagtgatagatcctgggaggctggactctggctgtgtccctcatctcctcaccacttcagtttctcataggactatccctccctcnnnnnnnnnnnnnnnnnnnnnnnnnnnnnnnnnnnnnnnnnnnnnnnnnnnnnnnnnnnnnnnnnnnnnnnnnnnnnnnnnnnnnnnnnnnnnnnnnnnnnnnnnnnnnnnnnnnnnnnnnnnnnnnnnnnnnnnnnnnnnnnnnnnnnnnnnnnnnnnnnnnnnnnnnnnnnnnnnnnnnnnnnnnnnnnnnntcttccctccttccttccctccctcagtccccatctcccctccccctcccccactgctgtctttctgttgtggagaatgaaccagagcttctggaatgttaagcaagtgccccattgctgagtcagagtcccagatcctatagggctaagttataggcaagcactgtgctgctgagccaagcccttagcccctcacccttacacaggctctctactgtgagctgtaccctaaccatccctggtggattctgggtaaatgctctccttctgacccacaccccagcccctcactggcagattctaagtgagtgtactaccacgaagcccgcccctcttgaccctactggactctctctctctctctctctctctctttctctctctctctctgctttctggatctcccccagattgtaccccacttcctctaaggtctagatgccttagtgtttactaagccaagtacaaggttacatacctatgagtcaacccaggcacccatttgttaaaatacagcctctgattttgtctggcttctaagctctcaggatgccaaagcttccggtcttccgatctcactctgaggactaagaatttaagaagccattaaggccatgggctgagcgagagtgacctaaatagtcagtgtagggcccatccgtgagggagaaactcagtgtgactggagcctgtcctgagcaagatgtccccatgtggttgtgcagatagcgcactgaacaaggaggtgtgagctagtgaagtatagtcataatcatgatacttggcttgaaactgagcctcctgggacccactgggtaaactgagtctgagcacagaggcaaccacatccatcgcccaacctcccatcttcaggcagaatgtggacagtcaaggaagagaccaaaatgctttgcgtttctctgcctgaattgtttctgggtaagggtgggactcacttggtggagtgcttgcctagcatacacgaagccttgagttcagtaacttcagcatcacacaaaccaggtatgttggcatcctcctgtaatctcggccccttggagaggtggaggcagtaagccgggaagttcaacaacgctgttgtctacacagtctgaagatagccagggctataagagacgaaagctggcagcccaattgttcagcactctcctgcccattgctcactcccaactcttagagctgagcttcagacacaaggacagagggctgagagctcctgctgaggggaggggagatccctaatgaacaacatgctccacctattcagccgcatccctcagccacacagccgcatatacacttggactttctccctgctgggatattaattatcacaaggctgaagtgaggggcgaccattaatatgagctccctcagaagcaaggagctggcctaggctgggacttggtgcttatctctgccgaccaggctttccgtgaacgcagctcccctggcacaatgccaggcccagtgaggatggagaggcccggctcctctgaccgtgctgagtatcccagctgagcttggggctcccttcctctactagaaccacaggcttggcaggatctctcagcaggcagagccattgccacagtgcagggtgggctttgagttcacatcacacccctgacccagccccaagtcgttctttccctcaggccactctgtcaggtgcaatagggatggtgcttgctctttgatgacaacagtgtcacttccttcttctgtcgaaacagttcattatccctttctctctaaccaccaccccagagaacagagtagcacatataattgctgtttaccggacatatcctatgggtctggagctgagcccagcactttcaagactttttattccttgacccccttggagaaagatgtgtccacttcccaccatgcatagacagaagcagaggcccagagatgatgtggggctgcctggggccacagggaaaactagcatgtccctaactgtgcatgacaaaatagtacctcatctcaacccatagctgtgacgagtcttggctctctgaggtccccagacccactcagacatctccccattctgagataattcttcctagcttggccatgatgaccctgcctgtaatcccagctatgatgtaaacagtagcaggaggctcatgagtttgaggtgagggaggagggggtatgctttccttcccttggcacgacactggccagccgagtctgtccatcagcagctcgcagtgttatcactgggtagaatttccccttgggtccattagcacccatcacatatgtgtccacagctcaccctcttgtgactagcttttaaagaacaaagaggccctgggagccctgctatggggacccttgtccttcacctccatcctcttgctaagtaatcctggtcctcctctttaggggtcctaacctcagcacctcccattcaggactctgaaccttgtgttaaggggcttccacatgctccactcctccagtaccaatgcatctccaagatcactgtattttcttccattctaaatgcccatttaccctccatcataagacataggcaattaagagttatcttgacgtagccaaattttaacagatgatggtactttccaccaagcttgtttgattccccaggtcccacacagcacaaggaaaaagccaatgcttacaagttatctctgatctccacgtgtgcacatttgtatgaaaacatacatacacacaaacatacacacatacacacacgcacaaattaaatgtaaatgtaagaattttttttctaaattcagttactcatggtcgttgccatacatactggcccacttgatctacttgaagtaatccatctgtatccattatctctgcctctggggagagtgggcagggatcaccctcctttctgagggactaagctaggatgagtagagttggagagatgaggatagaggaggtacatcgcccaatgccctggtcctcttcctggctcataatactcaaagtgatacttcctgtgcaggcaggaaatccctgcattttttttcttatattggttccacatcagctcggtacttcaaagccagcccccaagattttcctgaatgtcccagcctctgagtgtgaggttcaggggcaaagagggggaagagtattccattttcccatccatccccaaatttggttcttaaatattccctaattcctagggagacttccaagtaagctgctctcagaaagaaggaggacctttttctgagagtggacacatccacagccaaaaacagatgccaccaggaaggcaggagggagtgctaaggctcctctggggagtcagagggagtaagctggtcagactccctccttcacagcagcatcccttcccagaagcccttgggcaagagagctctaattgttgagcctgctcccagtagctgacacaggtcttcagttcctcacagcccatctgcctctcaaggaaactctcttgccaactcccaccgaggtggctgctgaggacagacaccacctgtgaccagagcagctgagctcagggatcataatgaccacagagaggagtccaactggggcaatgacaagcctttctttgggggaaactggatggcagaccaggggtggtggagactaggtggcaccctgtgagatgagtttaactgtaagctaaccctaacgtttctaaatcttgaaggcagagcctggctattgcactaaagagtcctgaggtcactgtgggtcccaggttctaggaggagacccagagaacctagctttgcgtcctcagccctaaggtcttcttgctctgaggactggagctctcagaccagaagggctaactctggaggccagcaagtgcttcctgttgtccccatgtgctggctcactgtctgtcactcatgagctcctcagcttatcctgcctttttttgggtgagaccacatcttgctgtacagttgcctggcactgcctgactcatagagggcatgctatgtgtgcccaagtaccacacacctcctgcaattggtccgttccctgctgccagccagggaacattagagatcattcagcgtagactcccacagcccctgctttcaaaacacttttctgcactaattatttatttaatttcgagggggttggtgggtgggtgtgggcacccaggaggtggtcaaaggaccaattgtgggaacagattctctccttgccccatggggattccagggactgaactcaggtgggcaagtagctttgtccattggtccttctcactgacctttactctccttttgagacaaggtgagcccaaggtggcctaaaacgaactctggaaccaaggcaggttccaaactcacaggaatcctcctgcttaaactcccaagtgctgagatggcagatgtgccccactcccacacttggctttgccttcctcttctgttctcagaggacacaaatgttcttgggacacctcctaggtccagatcccaccagtctacacctagccaattgcacttcatgggcaataaacccagcagatacttatagacttagttagtttttattgctgtgctaagacaccatggccaagacaacttacagtagaaagcatttaatgggggcttacagttccatagactgggtccctgtccatcatgtagggagcatggcagcagactggcaggtactaggacagtagctgagagcttacatctaatctatgagcaggaggcagaaagaatgcttatgcatagccttctaaagcctcaaagacttcccctgcttgtgacacatctcctccaacagggccacacctcctaatccttcccaagcagttctaccagttaggggccaactattcaaatgtgtgaggagatggagatggggcatggggcattcaaactaccacattaactttgacacaaaacacagcccccaccctactccgccccagccctccccaccccaggaatctttcccaatgagtgagatgggtagatcacataactgaaagcaagctcactagacccatcctgtaccaatacagactggggctgcaaaggcaggaggtgcttggccaggccaccaatgtcaggaacagagactggggagtcagtgtcctagcgtagggatgggcctttgtcttgttggcccatggaaagccctgctccagaaagttctcagttgtttgcaaagcagaatgggatggaagagacggcagaaggaaggctgcagacacacaaatcccatcttacccacgggaagccttcacagctgtgcccagccaccacaatccaaactactccatgaaaaacaatagaaacaaaaagcatctaaatatcgaatgaagtcctgttttgacgaatgtgacaaagtcataagctgcccagccaggaagtgactcagctccacacagcatagccacgctctgtaccacctttctgttagtcactcaacttgtcagttatctaaccagctactgccacagtgctgtgcctgaccaagtggcccctgttttactcaaaacaccagttgttcggttggattctttttccattcatctcttcatttcacttatttatagacacattcagtgagttgagccatttctatggttccaagtatttcctcacctgtccacttagggttcccaggacctatccccatgggcagagctactgtaaatgctctctgccctgagcccactcctcgttagagggctaaatctgtatctccctattttggaaaaggccctgtgtcccacttcctgctccctgcacctttttcccccctgagattttggaaagcatctcctttgaggctctcactgccccccgcccccattcccagccagggtctgaattttaaccattctattttctttaccgattttatgataaacagcactgtgtttccgatgcctttcctaagtgtgtcaggctgtccctcgaggcactgtgcgtccctccactccaggttgcccaatctcatgctcaccccagctgcgtgactcttcctgcctcccactggctcctttcaagtggccatcatatttctagtctaccccagatgcataaacatttgggggcaagtgtccatcatctcagactgaatctgggtcatgccggctgctgaactacccacgagtcaggtcctgaagtccagcaggacgtcttcacttcccgcctctatctcaggtaggatctcggctgcctctagcaaccatgcaactgtcatctctcatggaagaaaactccactgtcccgatgtccgagtcctggactgatccaggcagttattacttatgcataaaggaaatgatcgcatgtaaacctctctgagcccggttcatgaacacaggcatgcattggaaacaaaggctcgcaacgtaagcccatgttggcctggaatttatgatcctcctgcctcagccttcttagtcctgggatgagagctgtgtaccaccatataggtgctaggttttccttggctctccctttatccctcaggttcagaaggtctgtcaggcacatctttacttctctgtaaattccacctccaccatcagccatttgaacccccagagttaagttaggaacatctgattggaaacggtagaccccagagaccatttaaggcttactctgctgctccgttggtgatatctggacactgaggctaggggacgggtgtggacacagccgcagtcccaaaggtatgcttggaccaagtgaatgactaggctctggtacctcttgaatttgtttcctataaactctaggggcccagagggcctgctcagcttggccaggcagaggagaggccttctaaccagagaagctagcagtgcctggccagatgtgggaagagctccatgtcccctttgccgtgcaggctcacaggtccccgaggggtccggcgccctctgagctggcccgtgtccactggagctctccgggggaagtgcggctggctggctgctccgtggccagtctcctccatccagactgctcattgcactttttatggctcgaagctgagaatttatgaagcgggagaaagacagcgtgagactgaaggaagggcaggccagaagggggcgggtggatggcacttataacctctgttcgggcccaaagacactgtgcaaattatggcccacatctctccctttgtgtccactttgcattcctgatcagattaccttctttgtcttctttgggagcaaggagagcttgggacctaccacactggggagcttgtcccaggggtaagcagcccacagcatacaggccaggcactggctcctatggaggctggatatgggacatctgctgactctgcagagagtggagggaatgtttcctcaatggacagacacccatgctaaagggttctcactactcacagctctgcaggagacctggcccgtggtctacccaggagttggtggtgaataattcccaggcccgtttctatctggtctgggcctggaactggaagagttggattcctgctatgaccaccctcacacgaggtagccacgcccttcttctgtatgccagttgagtgatatcatgtctgcattcagtcattgcccagaagtgctaagtagacagctctctcagggtggtgttgggtcaggagactgtgatgtgctggtcactgggcagacactgtcagctaaagaaaagaatagacatatgcctttggccaaagtccttgacctctacatgggactggctgcaactgtgtgggtggcagagggtatacaagagggtgacattgcagggctctgtaatgctgctatttggagtggggctgcagactcacactggagaaaggtgggactgaagacagaaacacatccattgccaatattcaatcaatccttctgtctaaagcgctagggggacaggaaggcatatatctatatcatctatatctatatctatatacattccatatccatccatccatcatctatctatctatctatctatctatctatctatctatctatctatcatctatatgagaggcaggagatttggagatgaaggagacagagcaaccagtagcgcatgggtgaggttggtgggaggggctttttggagtgcagcttaagtgggtgacagccttggttggtatgaccattgaaaatacagggtgagcaccctggccatgtcctgagtcttagaggtcttctacagtcccaaaagtttctagaacctttggaatgagtcagatctgtttgactgtgtatttgcattgatgcttgtagaagccttatgatacccttcactgagaagagccaccggaccactccccaccccacctttccagtggcacatgtagatgagggcctgggaacaaggggcaagtattccccgactttgcagccagcagctctgacaccaccccataaagagctgctcgactctctaattgaataatgtgtgggaataataggatttttcccagagccatccgttacgtttcagagccaaatcataacgagaaagtcattagtcgtaataaacacagtagagagccggagacatgatctgtcaagggtctgatggacgacacagcggcagggagggacagtcatcccatttgcatttctgtaagctggcagaatgtcactgacaccccacccctcaccaccacccccaaaccaaaagtcagagcaagaaagcacattaagctgaggatttgtcccctcctggtgtacccaaggctggtaatggctctgcttctgccgagtggctctttatacttccttacaaaactgagtgtcatcaggaaattgtcctttcccattgctcttcaatcagactgtgtctggagagtccgctaatgagtgggcctgtggggttctccaagacccaggctttgccccaacaggtttttttgactccccagctcctgaaaaggtccaggtgaaggtgtccttgtcttgcatcggcttcttcctagaatcctacacaagcaatatcaaggtccatagagggccatgctgtgaccaccccctgtcctgacttcttatgtcccaatgcttgagatggagggggtctcattatggcataataacaaggagactgaggccaagaagcaactccccaggctgggaagatagcttatttggcaaagtgcttgtcaaacaagcttgaggacctgagttcaatacccagcacccataaaggagccaggttgagagatggatgcttgtattcccagcactggaacagcagacaggaggaattctaggatgcacttgtctccagtctagtcaaatgattgagctccaggttcagtgaaggatccctgtctcaaaaaactaagataggagagtgactcaggaagacacctaccactttctatgcacacacatgccaattagagcattccctggtctatagcagagctggaattcaagcccgtggacagttatgggagccacatacaaagtaggtgttcaagaaattcatgggttcattatccccgggttctctcacgggcggtggaacactcagctttgtccctggccctgatcccatttccaaacaggagcaactaaggcccacagtcaaggtcactgttgcacagctcaggaaagaaaacggcctggctgtaccactcactcacgtgctttccctatgaggtcgctacaggatgtgttgctcagggaggaagtgatgagggagtctttttttttccaaatggacagaatgtgaactctaagctgcagatttgccacaccctccagaaggttctagtagcatgcccttggtcttagagaaggttctaatagcttgccgctggtcttccagaaggttctaatagcttgccaccagtcttcccgaggggctgacagggaaggtgatggtgctgggaaacatctctgcttagatcataaccagagaatcccagaaccttgacccctaatcccctcactcaccatgcatataatgtctagggaaactgaagcccagacaggagacagttgacattcagggatgcatcatgattggtgaggtactggccccaaagttgtttcaccccccaccccaaccttgggctcctgtcttgttcagtacggttgtttctttttgaatcttgaattaatctgattttagcaacacagtatactaggtgagggcattggggtggtctgatggcaaagggaatgctttctagcaaatgacaggcagctacaaaaactccctgcttggtgggggtgggcgacgttagctcacaggagttggcagtcagtcttctcagcttgtgtttgcttttctttacaaaagtacatttgtgtttctgaagcgcaccaacaaacggtggctgtcccactatactaaagcctcaccgaagcccggggaggctggcagggcacagactcttgtagctggactacaatggggaaagtgaggtagaggaggggacctactgagtctcccatttgtcaagagcagaatcagaactgagcaacacattggaatctaagatcaaaagccctgggctgtgtaaccctgagaagatgggttgcttgtctctgggtgatctagggagatcccagtacctgaccctgccagtcaggacctaagccccaggtcactggtgaggtctctccccatgttgtctccctacctgcttgatgctctgactcccttcccagctagcagggcaaatgaatgaccttgacctacagacagcacactacagtctggtcctctttgtgacatcccagctaggctatcagagtaaacacactgatgtactctgggggctctagggcaaaactggcttactttcgagcccagcctaccggcaacttggaacccaggtctctccaagcaaggaagcaaccctcctaaaaaccagggtgtcacttccaagccaagcaagccatgctctgtggctcagcacccacttccctgcccttgtggcaactgatagacacactccaagcctgagttcaagttcccaggccctccgccttcatccctccccctgcctctcctcctcctcctcctcctcccccctcctctctccatgtgacctctcttcctcctcttcttccatttaccctgttctctgacccctcttctttgtctcttttcctccagccttttctccttctccatctctgctcaccttttccttccttctctactcccggagggtgggatgcacctagcagaagagcaagcatccatggcttcttaacactttttctgccaggatcctagttgaaaccatgggcctcttttttttctgggaacctgggagtcttgagagggtagcctgggactggccactcactgagcactggggagctctcacaacctcagagtcaagtcgtagagagatgcctccagttgttagggtaaagtgcaaggcctggggctctctcaaagaccagagtgcatatttttctaggcctctgggctcctggggctgcactgggagaacccaccaagtcagaggagagcagatggcagctcttttcttcattttgtggcacaaaatgtgtctgtgctttctagattttagtcacagagtgtgcactccatcccagcatccatggtccttggagagtgatggcagctgggatcccccacatatgactacacatagactcttgtggatgagcctatctggcccccactatcccaagaagttgtatactcatctccccagaagatactggggcagtggtctccccatttcaacctttcccaaactgctttggaaaatgacaagagagaaagtcccaaatgagacagggaagactttcagaattgaaaatccccattcccttctccagccactgctggctgtggccctaacctgggaattcccagcatccccccgggctagtggcctcacaatgctcggtaacttcccatcctacagagaactgagatggagctgggactccaacaaggttctatgtcgggccttagaaagacgactccctcctgggttcccattgccgtttctgtcccttagcctgactcttgagaccttcgttacctctccagtccttgggtttcaggaagtgggttttagagagggccccacagcttccgccagcctggctttccctggcagagcaaacactcccgagagcgcatgcttctcatgcagcttgtagcctctttcgaaatagacagccatcaggttcatatggatccttccagcccccttctgtccctaataatccctcctctggggcggtatcgattctcagctgcaggttgcctcttggtatgcgggagcctggtttggggtggataaatcgctgcgctgtcatcttcacgcggcaattacccgctctgattcctctcctccagccacgcagacacccgcttatcgacaacatgctcgctcaagccccagccagctgggcagggagccccgtggacctgtaggagcagagactctggcaaggcaagcttagacccccacccccaccccagctctgaagctggacacagtggggagatgttgaaagggaagtctgttcactacagatattgaggcacccctgtgggcatgtaggtggaaccctgcatcttttcctgcgtctcgcattcgcatgtaaagaaagtcatcccacagctgttctttttcattgtgctccctgttggggcttggaacctggacccagcttacgggctagtggacaccttctacaaagcaccgcctagtaagtagttagaattctcctagggtctctgttgcaaccattaagcttcctggccacacaaaagcaattatagatggtatatatacaggtaagtccagcctgggacacacacactggatacaggccatgtgaccaaggatgacaataaatgtgacacaaatgtttaactgtaaagcttactaaaacatgatgataatttttatctatctatctatctatctatctatctatctatttatggtgattagactgcatgggtctggaacatgaactttggaaatgttcagagatgacagatgtcagcatcacaggattgggcacacctgaaagatgcatgagcatggctaggccacagatgctgagctcggatcttatgcaatttccatgagctatgaaatactatctccagattccctccccccccaacacacgcgtggaaacgttggtgacgtgcacaaacacaggctgtgtgggccaagtccagcctcaaccatagattgttcaccccctaatactttgatttttatctatccagtctgtctgtctgcctgcctgccagtctgtgtgtttgagtgaatgtgagagtgagttaaacacacagccatgtgcataccacagtgtggaaatcagataatgacttgcaggagtctgttctctctctccagcacaggtcctaggtcatgaggcttgcgcatcgaggacttttacctgctgagccatctctccctggcccctgatttgatctgtagaggatcctaaggatgtttttttgtacttgatactcttcctgcttccattctccagataagaaaaccgaggccatcggagggaagcatcttacctccctgcagcagggagggatgctgtagctgcggtctctcagcaggtggagaccctctggagtgttctatgtagttgtgtagagatacacagttgaccttgcttactgaggggcatcctgggatctcggccccacagctggagctagattcagttctgtcacatatttctctgggacatctgctttttccagagcatctgcttcctcacgtgggggaaataaagaaagtaaagattgttgctaagcatcttccaccctaaaagtcacggctcaccgtgaccctgattggcgcttgaaccactatcttcagtggcataatatgtatagagatcgtcagccccaagcccaccgcctcctacagcaggaccctggcctcacatcccacctgcctgtcgatgccagagtgcttcagtctccattgaccataagtcctgctctagaggtagcctcgctgtggtctttacagcgaagctgagctcagcggacccccacctgggcaggaagccagggagataagaccagccagggcctggccactgatacctggcgtgaaattgaaaagcactcgacttctccctccacagcccggtgcctccagtgagacaacgtagctgggaacggtgaatgaaatcgagcagccgggccagactccaggcctccctccacactccagttccccttatccctcctaggggaggtgaaggcgcagtccagtttgcacgaactcagcctctttagggatgctggcggctttgtgcaggctacactttgcccaggaggcttgcggatgcttagggagatgcatgtgagtttacagatgctgccgctcaaggccaacgttgctatgtagctccaggcttgtggcagcacaagggtagggagtggcgagctgacccagcccgagtcagaagaatctcttcctgaggccctgtccagagaagggcattgaggcctgggagctaaggacctggtctggtatgcaaagaagcaagtcacttttggccccagttcctggaacggggcttctacattaggcctggcacgagccatgcttgtccctctccagaactcaattcctcagaaagcctgtaagaaatatggcttacagacttaagcggggcatacacaattcactcagcgtccagcatctctggtgtgggtgccaagggcctttggccagctgcagccttgctaggttcacagatgaccagttttctctcttcttgatggtagctgaactaatttgtgattcactcttgtgtgtgtgtgtgggggggggggggtgcagattcctgtcttcaacatccgagccaagcagtttgcctttcttcagcatcctgatttggacccaaatcacttcactctccaggccacaactggcaaggaaaaagattctttgcccatcttgcaaatgggtcaatagaagctggcatggacacttgagccccaaggtgcaatttagggcccagggtgaagttgggcatcagcaccccgttgctaaccaggactccgcattgggagaggggcttggggggggggatgctaaaagctactgattcctggtcatgtggtccctgcaaagtagcagggcactggagctcggagtgaatgtaaagtgagtctttaggcatcttggaaggtgtctgactaggggaaaagccgagaaaaagtaagttggaggaagaggaagaagaagaggaggaggaagaggaggaggaggaggaagaagaagaagaagaggaagaagagggagaggaggagggggaggaggaggaggaggaggaggaggaggaggaggaggagcttatttcccatccatcagtagctgctgttttaaagggccaggcttaccttttccagccccggtaggatgaaggaggaggaattggcatttaatcaaagctacattcgacaaagcttttattagtcccctggccttattacagtgattttttactctgaggtttttaagttaattttcctagtttttaactgaactctgaatcgtgtgactcaccagacccgagcaaggtggccaggacttgagggaaagtgaaaagtgagagaaatcaaatcgaataagctcacctcatccagtggaccaggagagtggacggcaaacaaccttaataacagaggaaggctccagacagaggtgggagtgggccgctgaaatggggcctaatcagctggagctggaggggtcccaatcactcctaggctggcaggggcaggcagagtgcaggaggctgagagaagagagcaggctggggctggggctgggcaggccgcaatcagggcccaggcagagcctgcccacgcccacttctcttcctccagctgagggacattaaccccttagagacaaggacagggaagaggagtggcaggtccatcccatcccgggagtgaggatttaccgtcttggggtgctctgcacccctaactcttcttcccataatcaggtgcaaagtagggaccacctattcacaaagccccaaagagcaaagaaacattggctgccgatgcctggggtgaagacataggcccgtctcccaccctctcctccttcaaatgaacctcagtgcattttgcttctacagacagatcagacccccatcaagtggctactcccgtttcttcacagtcagatgatcgctttatggctaggcttagagctaggggtggcccagggattgggtctcattacatgttcacagtggactaggtctggagccatagccaagggtagtgtcagggctgtgcctctggccatgacagtgggaaagaaaatccaccagcatcctgtgggctgctaaagaagagatttggactcacagaacaaccaggaatcctaagcaggagagggaggttaaaccatactgggcgaactactgataccaacacggtagacagcctagcttccctgagcatactatcatgggctctccaggcccaggctagtcactacaagggtcactttgagtctcatggagttacaggcaacatcagaagggacatccaggtggtaaggacccaagagaagtcccaggctgtcctagctcaatttgatatctgtgtgataaacacctgtaaccaaaagcaacttgggagggaggggcttattttcttttgtggcttacatccagcccagagggaagccaagtcaggaccatggaggcaggaatggaagcagagactgtggaggaatgctgcgtactggctcactctctgaagcttgctcagccttgttttttaaacatctcaagactgcctgaccaggggtggcatcacccacagtgggctgggcctcctcacagatccatatcattcattagtcaagacaaatgctcccacagacttctagaggccaatcttacagaggccattccccaactgaagtttttctcttcccaaatgattctagattgtatcacgttgattagcaacctcatcagtgcaaggaccatctggagaaggctcagctgtcacaacttgacacaaacatttttgtgtgtgtgtgtgtatgggtacatgtatgtgggtgttttatttatatatgtgtatatatacatgtgtaagtatgaacatgtgtgtgcagctatccacagagaccagaagtgggcattaaatctcttggagctgtagttacaggtggttgtgagacacctgatgtagttgcagggcccagagttcagctcctctgttaagagcagtaagtgaccttaaccaccgagccatttctctaagccttgccaatatgcttttctttgacacttgtatgcatttctgggttacagtgtggcatttcacatgcaccacatgtggtgatcagatcaaggtaatgcattgcatgtctattccatgctaaagggactgagacccaatgaccatagcgtcttcacactcggggcatgtagatcctcatctctcatcttgcaacccctctccatgtctaatcccaaagacccaacctactgagaccatggctttcagacagatgtgtcttctctgtgctcttgtcagcccctggcccccctgtctcaggtgtcttgctctccccacctttgcagccacagtggaatcgagagtcattgccttgtgccaagaatacccttgtcacagctgctacatgccagacacaaggctgtggtggtcccaggtgtggtgatcgaggcagctggggaatgttaacgtggcttgctatggcttgattcttttttttttttttttttttttttttttttgagacagggtttctctgtatagccctggctgtcctggaacttactttgtagaccaggctggccttgaactcagaaatccacctgcctctgcctcctgagggctggaattaaaggcatgtgccaccatgcccagcctgtgacttgattcttaaacaaagaagagatgtgccaggtggccacagtgcagggtagtgggcctctcaagcccacaggagcagcccagcctggcttggggcatcaagggattccaggtctctggaagtggtccccagtgggaagtgaaaggtaacaggcattgtccttatgtccctgtcctcgaatgtcacctgacatgtatgaggtgttcagtaattctgtgttgaatgactgaataaatacaccaggaagactgctccaggcagaggacagcataagcaaatgcagcaggtgtcttaccctggtggcggagcagctgggagctaccattccggtctagcttctttcaagtcaggccttaatacaagggagagactggtaccaactgagttgtggcttggtccactccatgagagttggtctagtggagccactgcccagtcaatacttatgggattaataaaggaagaaacttgagagtcagaagcaggcatcagggttgcccagcattcagaaaagatgttttgcaggagttgggggaagggatggctcagtggggaaaatgcttagtgctcaagtgtggagcactgagtttgatccccactgcttggtaaaaagttatgcatggcggtccagtcagatgctcagggatggaggatgataaagaaagaggcctcacaggccagccagtctagccaaaaaccttcagtgagtgatgagagactttgccttaaaaaaaaaaaaaaagatggagagagatccagaaaaacaaccgtcagtggcccactgacttctggcctccagatgcacaaacaagcatatgtcacacacagtggaaggggctcaatagcatcttaacatcctgggccctggggacatacagtgggtagaacccaacatggcccaacttgagggactcagattctcagtaagcagtgggctattgagttatataattgcacaagtggttgattggcaccccaagaaaaagtccacattatctggtaagaccagcaagagcctgatgtgaaggtcaagcaggtgtctgtacaggtgaagaggagagggatttgtggctgggctgtagggcactggcctgagggcagtagggtccaaggttacaagcagatctggggcaagtgagatagagaagctggcagatagggccatgtgtcgcatcagagggtaccatgacattgacccgggggccagtgaaagccatgggaagactattggaatgcatgggcagggctgtggcatttatgtcagctattgggacatctgtgtggcagagagctctaagatgtgtacatggcctgataccacccctgaggaagcctgttgtcctggaagtctgggctccagtgtggccatgtttaaggtggaaccttctggaaaggaggacctgggggtggaaggatgtgtaccctgggggtccacccttggaagtgatgaattctcgtttccatgctgagattgttgtagagtgggttatcatgaagcctgttccccatgcctgtggacctttctacgctcagctgctttgtctgcacttaatccattgtgatatggccaaggaatccttaccagaggctgaacagattccaggtacccatcttggaattttaacttctgcactatgagttagatgaacttcttttctttatcaagtatgcagacacaagtattttgttatagcaacagaaaccaggttaaaaaaaaaaacaggatgaaggtggtaaggaagtaagaaaagagttggtaagaaaaaagttgagggtgggatggaggggaagggaagggggaggggaggggcagaaggacaaaggacctgggctctggtttctggcctaacagctgtatatagtacaattgtctcaacattcacagagccaaagatgcaatttctagggctgatttgtagctacttcttaggtatgtagtatcagaagtgcccttcagacacccaggtaggtgtcaaggtggtttgtttgggatccaggggcctccatggaagtagagttgccttagctgtcttcgtcagggcaaaggagcccctcagcctgcctcctatccacagaagtgtgtgcaggggtcctgggaaggctctgcagctcctccatcccgcctggagcctgtcaaacgcacgctgatggagtgcctttctctgtacagcaatagatttggtcccagcagttggctgtaagtgctttcagccctgacgtttggcactggggcagtgggagggctgggatggagcggggaagcccaggggacatggttctcagctctcagaagcctgccttctttgtgcctgaataagtgccacagccctgcacctcacatcacaggcctgtcaccaggcagtttgcagggacagagtatccttgccggttgggtggagacagcctgtgggtcagttctcagaggccagtggcaccagaaagcacatgctgcattgtttactccgtgaaccagcagtattgtctgaccagacactttcctcccgtcaacacgttccaaggaacaggatgtgagatctgtggcatagcaggctggatggaagacagagcacacacacacacacacacacacacacacacacacacacacacacacacatacacacacacagtggggggccggggaaaatccaactcaaaccatgtgcagatagcttcccatagatctttggggtgtgatattgaaccagaccagggaaggcacagtactcacccacagggacacaggaaaagaaatacagtttcctaagtagtgcctgggctacgttcttctagacaaagcactgtggtttaataggcttcactcaggagtggcgttaaattgccacgcctgtctccttgaaaaagtcacctgctggctgtacccagagcccaggcaaagccctccaggagttcttgaggtgccagctctgaggttagaggtggcttgctgctgtcttgtctgagagtgacaggctgcctgcaatcaccataattgatagctcaggaggcagaggcagtaaataattgttccacaaggttctagaatgagtgtaattagtacagttaacaatggtgggtgattaattggtccatttggtgccagtgtgaatggaggagaccctgcatgggagatgaagatggagcctctccccttccccaaacaccaaacagctcggatctgacctgtagtgagcattgtcgtaggatgaaggcagatggctagccgttagttggggcccacggataggatgtatccgcaaaggctggagtgtgggaaaactgggtgtggtctccatattgctttgaccattagttaaaggtcagcatgctatgggaagtggattcttacaggggaggaatgattcagttatgtcagagaattccggacttcaggtttgctggcccctaagggagctcactgaatgacagtctcttagccactgagctgaagtgctcttgggcatccctgttaaggagaccggatctcagttcaaaggcctctatggagggacattctgaagatggggtaccaagcaactttgaaaccacttgcccatgccaacccattgataacagcagttcggtgtgcctagttgggatcctgaagtctggtgctgtggctcactgatggataacagcctttcttgagtacagagtgaaggagaggcagcctgggtgtcttagtcagggtttctattactgcaacagaacaccatgaccaagaagcaatttggggaggaaaggatttattcggattacacattgctgttcatcaccaaaggaagtcaggacaggaactcaagcagggcaggaacctggaggcaggaactgatcccagcagaggccatggagaggtgctgtttattggcttgtgtttcctggcttgcttgctcagcttccttccttccttcctttctccctnnnnnnnnnnnnnnnnnnnnctccctccctccctccctttctccctccctcccttcctcccttcctcccttccttcctttctttttgttttgttttttcaagacagggtatttcagtatagccctggctgtcccagaacttactctgtagaccaggctggccttgaacgcagaaatccacctgcctctgcctcccaagtactgggattaaaggaatgtgccatcactgcttggttcagcctgctttcttatagaactcaggaccaccagcccagggatggcaccacccacaataatctgggccctcccacccttgatcactaattgagaaaatgcttacagctggatcccatggaggcatctcctcaagggaggctcctttctctgtgacaactccaagttgacacacataaacagccagtacactgagtgacagccattcagaatgtcaactccatttgaggccagtcctctactttcttctaagctgggctcttaaggccttgctaattgtgttttcctgggaccttgcttattaaccaccaccccccccacacacaccccttaccccaagaaacaaacagtggctttactgacttcagggcattcagaggatctgagaggataccaggaagacagcattagtctcagcttctgaggtccctaatgaagcaacaagcaagggcgtggatgggactgccaggtgtacccagctatcccttgctgtgcccagggtactagtccttcctggggagtaagaaacttctctaacaaagacctagagccttggaagccatgtgctaaggcagcactgcatcccaagcatggattcaaccctgcagagaggggcatcagccccttagtgcccctgcatgcttctcttttccaatgggtatggagaagcacacggagtgccaaagagggtttatattttaacactaagtcacccagaattctcttcccaaagacttctgaagttttgggatacaacattaagatcaacctcactgtgggaaatccatagcccaggtgcaaccaagggcactcatttctgttacttcttcccaactttcccagtctcagggcagagtgaatctctctctctctctctctctctctctctctctctctctctctctctctccacacacacacacacacacacacacactggacaagctgagttttgcagggccaacttaaatttcattctgacagggagggactccatatctatgggtaggctttctggagggaagaaagaacccgtaggtgggggaagggattaccacaagccaacccttcagcaccctcctgcaagctccaaacacagaaatgcagagtgtacaccatacacacacacacacacacacacacacacacacacacacacacacacacacatatctgcaagccagtatcaaggaagcgagcggagcacagacctaatgattcgtgattattatttgaagggtcccactgttacagatttatttgtcatttcttgtaataacaccgatggtaatgaattcatttgtattaatgcgagtgtcgcgcggacttccacgcagattccgcattaattaatgtaccattaaaacaaagtgtcgcccaattaatatcaaacggaggtgaggctgccagggtcctcttcatctgggtttcatttgaaattcatggtgttagcactccatttaatgagaggcagcaatttctatcccaagctctcccacttcctatggaactggacggagttccagcttggggactggcctcagtgacagagagaagaaggagggaaaggtgttctcctagaaatgtcactatgtctgttaactctaggtggggtccgagatgccttggaactttcttccctggttgaccgccaacttgactcatcaaagaggtgcatgtaggatttttgggcctccagatgtgcctgaagccatggagtccagaagcccatgttaacaaggttaacaagagcctgcccccgccctaaggttttcacaggcctccacttgcccggaacatcagggacagaggctctaccatcttggtctttagaatgcatcttgggacagttcccaagaatagccctgtggggtgttctcaccttccaaagtaagttctttaggtgagagggtctcctggctaccttcaggcaagtcatagaacctgagtctgccaatccttggcagtggcgaggttggctactagacatgggttaggctaagttagatgatgcagaattcttgtgtctgtaggatccatccctagggcttgcaacagccatcagagagccaaggaggctgaatcacagggtaccacattttcttctatcttggcctgggatgctctttaatctctgagttcttcctttatggatggcccactacagggctgtaggcatgatgcaggttaagcccctccggcagggtggaacttcagaatctgtgttttatcccatccctgagagtgccacataagccagtaggaagggaggctccttaaaacagcttttcccttccaaacttgcagcccttgtgtgttctgaggatgggcccagagaaaggaactgggttttcagcaagggtgcctacaaactggcatcaggaaaaactcaagtcagggctttctatggtaggaaggatgtagctgtaccttatccagaactacgctggggccaggcactccaaacctttagggatctatgtcaaaggccacacccctccctaagaggctaagaaaaacgagcggttgggcatgccatcttccatccttgttaggacacaagtagggcaaggccagggaatgagctcttcagtgaccgtttgagtgatgacagccaggccccctttcttccctgggtcttggcttccccagccatagcatggactgctgagctggggtcggcttctctgccatggtgtcacactggattctcctaaaaatatacaagactgagtctgttggtggtttgacactgagaccaactggttctaaccagcactgggtatagacatctcctcaagtgcttttgttttgttttgggagtgttttgttttgttgtgggggtgttttgttttgttttgttttgttttttccttcaagacagggtctcatatagtccagactggcccttgaacttgctatgtagctaaagatttccttgaactgccaatcttcctgaatactggaatttctgatgcctggttttcaatttctctccacctgttgagtcttaaattaccttcccatagtccccaagatccagcaaactccttggtcatcctttccctgcctgtctcaggaccaggggcagccagccctcagcaaccctgcagccagtgtgaagccttctccttgctctcccccacacccctcccacctttgaccgagtccatccagaccctccccaggaataagtgccaggctcacaccacctgaggggctggtagctgtagccacaggagtgggagggggaaaagccacagcaccctgtgccactcttgccctgccccttctggcctctgatgcttcttcacccaccggttcctctgtgtactctgtgcagggtcaagatgtgaagcactgggagagggaggagggagactgagttctattgcttgagctgtctccttattcagatccattcattagcaatagcttccagagctgcaaggcccgccctaaggaaatttacatattcatttgtttaacaactcatcatcaagggaagccatgagccttaggcctgggagaaggaacccctttggatcggaggtggagagggactgagggcaaagcagagaccacaacctttaactcatcccctttgattcagagccttcctacttgaagtgacagttttgaaaaacactttatattgttctttgtctgcacagatggccacccttcacctctatgtctgccccaggaggttggagcctaatcttttttagactcacactgtgcactgagtgctttgcctgctgtttcctgtaggggacagatctcctaatgtgtgcacctcactgttaggaaactggcccagagagcctgtattagtcagggttctctagagtcacagaacttatggatagtctctagataataaaggaatttattgatgacttacagtcggcagctcaattcccaacaatcgttcagtcacagctgtgaatggaagtccaaggatctagcagttactcagtctcacgcagcaagcaggcgaaggagcaggagcaagagctagagctagactcccttcttccaatgtccttatattgtctccagcaaaaggtgtagcccagattaaaggtgtgttccaccacacctttaatcccagatgaaaggcatagcccagattaaaggtgtgttccttaactcggagattcaatcttctggaatccatagccactatggctcaagatcttcaaaccaagatccagataaggatctccaagcctccagataagggtcactggtgagccttccaattccgaattgtagttcattccaaatattgtcaagttgacaaccaggaatagccactacaatccaccccttgtcaacttgacacaaataatatctcatgttcacatgaaacaataacaaggttgtaaatacgcctaacatgatataactatccctcgtacaatcgcaaacgcattagtaaatttacaatgggcattcatattactttataatcctcgtttctgcaactggttacgtggccttaattggtatttataactaccttcctctactacccattctgtatttccttcaccttcagccagcacctcagcaggtcttggctcttttcctggaggattgacccataccttcattcctgatgggtctgcgtcctttgtcatcctgcttggattaggctgttgtagtttcccattgactttaatcacaggacatggtagtactaagagacgccctaagggatctcctgcactccagacataatcttgcttaccaccattgtgaagaggtaatccaatttccccatggtaatctggatctatcacccctcctaacactgttattccttttttagcctgttggtttaagggcattagaagcccaaaatgaccagggggaagtctgagcttccagttcaatggaatgtttgttgtagctcctggtaggaggactcccctctctggagccaaaacttctaggccagcagaacctagagttatggggacaggaagcaaaaattttcctagagggtcactaggagtgatagtaagtggaactattcctttttccaccccttgattcctggacccatgaatcctggctatgggtgaaactgtaccatatatcgagcgctgattcaaagcatatactgccttctgaagaactctgccccagccttccaagctgttaccacctaattggcgctgtaactgcgtcttcaaaaggccattccatctttctatcagcccagctgcttcaggatgatggggaatgtggtaagaccagtgtattccatgatcgtgggcccactgtcgaacttctctggctgtgaaatgagttccttggtcagaagcaatactgtgtggaataccatgacgatagatgaggcattctgtcaatccgtgaatggtggttttagcagaggcattacgtgcaggaaaggcaaatccataaccagaataagtatctactccagtaagaacaaaacgctgtcctttccacgaaggaagtggtccaatgtagtcaacctgccaccaggttgctggctggtcacctcgaggaatggtgccatatctggggctcagtgttggtttctgctgttggcagatctggcaatcagcagcagctgtagccaggtcagccttggtgagtggaagcccatgttgctgagcccaagcataacctccatctcgaccaccatggccactttgttcatgtgcccattgagcaatgacagggatggctggggagagaggctgattgtccacagaacgggtcatcttatccacttgattattgaactcctcctcagctgaagtcaccttttggtgagcatttacatgggacacaaatatcttcacatcctttgcccatttggagagatctatccacatacttcttccccagatgtctttctcaccaattttccaattgtgatctttccaagtccctgaccatccagccaatccattggctacagcccatgagtcagtgtataatcgtacatctggccatttcttcttgcaaacaaactgtaataccatgtgtactgcccgaagttctgcccactgtgaagatttcccttcacctgtgtctttcaaggttgtcccagaaaggggttgtaatgctgcagctgtccacttctgggtggtgcctgcataacgtgcagagccatcagtaaaccaggctctagtcttctcctcttcggtcagttgatcatagggaacaccccatgaggctataggtgcatgcttggcagcagatggcattgtaacaggagtagaaaccataggcatttgagcaacttcttcatgtaacttgcttgtgccttcaggacctgctctggcccgatcacgtatataccacttccatttgataatagactgctgctgtgcacgtcccactttatgacttgcagggtctgatagtacccagctcatgatgggtagttcaggtcgcatagtgacttggtgtcctattgtcagacgttcagtttccactaaggcccaatagcaggccaagagctgtttttcaaagggagaatagttgtctgcagatgatggtagagctttgctccaaaatcccaaaggccttttctgtgattcacctacaggggcctgccagaggctccaaacagcatctctatcagccacagacacctcaagtaccatcggatctgctgggtcatatggtccagtggtagagcagcctgcacagcagcctggacctgttgaaggccttctcctgttccaggccccacacaaagctagcagctttccgagtcacttggtaaataggcctaagtaacacacccaagtgagggatgtgttgtctccagaatccaaatagacccactaaacgttgtgcttctttcttggttgtaggaggggccaggtgcaataacttatctttcaccttagaaggaatatctctgcatgccccacaccactggactcctaagaatttcactgaggtagatggtccttgaattttggttggatttatttcccatcctctgatacgcatatgtgttaccaatgagtccaaagtggttgctacttcctgctcacttggtccaatcagcataatgtcatcaatatagtgcaccaatgtgatattttgtggaagatccaaacgatcaagatcccttctaactaaattatgacacagggcaggagagttaatatatccttgaggcaaaactgtgaaggtatactgttggccttgccaactgaaagcaaattgcttctggtggtccttatggacaggtactgagaagaaggcatttgccagatcaatagccgcataccaggtgccaggagatgtgttaatttgctcaagtaacgaaactacatctggtacagcagctgcaattggagttactacctgatttagttttcgataatcaactgtcattctccatgatccatctgttttctgcactggccagataggagagttaaacggagatgtggtgggaaccaccacccctgcgtctttcaagtccttgatagtggcagtaatttctgcaatgcctccaggaatacgatactgtttttgattcactattttctttggcaaaggcaactctaaaggcttccatttggcctttccaaccataatagccctcactctacagttcagggaaccaatatgagaattctgccaatttctgagtatatctatcccaattatacattctggaactggggaaatcaccacaggatgtgtccggggacctactggacctactgtgagtcggacatcagtcaaaactccattaatcacctgccctccataagcccctactttaactggagggccacaatgtttcttgggatcccctgggatcagtgtcaactcagaaccagtatccagcagaccccgaaaagtctgattatttccttttccccagtgtacagttacccttgtaaaaggccgtaggtccctctggggaagaactggagaaagggtaacagcaaaacctttgagtgtcttatcaagatccttcctcagaggaacctggccaccccttcattcaaggggttccggatctgcaaactggctcaagtctggaaattgattcactggccgagattgctgtttaccacgatctaatgtagcctttctttcattgtgctgtttccctcgatctaatgtagcctttctttcatttgtttgagaatttttctgcttatacagatcaaacaaatatgcagtaggcttcctatgtatttcattcctggaaacaccatgattgattagccagtaccaaaggtccaaccgagtcatgccattataaatttcacctctcctgtgctgaccattactgggtatgttattataaacattcttttgtctacactgtccattataataactagaatcaccttgtctctggcgattcaatgctgccacctggcccttgttacctcggaatccaactaaacccagtgaatttaattcatctaattgagcagaagcatctccaatgctaagatctggcacaaggaaaagggaaagaacaaaacccttcaaatgtgctggtgcccctctcaccaatttgcgtcttatagagctggtgaaaggcatatcttctggaccttcccattgtggacaattatgctttacacaatatatccactctagcattgcaatttccctaagtcttaaaatcccttcatcaacactaagccacggaatatcaggcatctccaagtcatttccagtaggccatcttttgataaagacctcagccaaccattcaaacaaacttttgacaccttttttaactatgcgagcttccgtattaaacctagaatctctactcagaggacccatgtcaataaactcagcctgctctagtcttatgttccttccacccttatcccacacccttaaaatccattcccacacatattcaccaggtttctgcttgaatgaattagcaaactcattaagctccttagtagtgtagcgaatttcctcatggactacactttctacctcccctctaggagcctgttttgctttgagtctggttacaggtctagaagaaactattggtgggccgtgagcagactctgcaaaattaatttcctcatgtggggaaggcattatttcaagaggtggggctgagggtactacttcctcaggtggggcaaacccttgagaatctgaggattcaaaattctcagcttcaacatggtcttcccacacatccccatcccatgttgtaggatcccattctttgccaattagagcccttactttaactgtcgacacactctgaggctgagacttgaattttcgctgtagttcagccaaccttacaatgagagtttctgtttgattttctgcaacttgagctctattgctacaagagagaagattctcctcaaggacacacttagcaacttttagatcgtttacttgtgtctggagcctttcgattttatcacacaactccttcctttcattcatcattttttccacagatactaagagcagccagccagtaaaatcatttttcgattttttccccatcttgtagaaagctttgtgcactgaatcacctaattcattaagaaaatcaagggcattagcttctttaagttcggaatatagtttcaaccatgggtcttcaaaattctctgagctcccaggagggagagaatctggagaggtttcaatagttgaaagtgctggtggatcaacaagccaattccagaattttaaaagattcatccttgtacttctgttactctagaaccactcctggtaccaacttctgtattagtcagggttctctagagtcacagaacttatggatagtctctagataataaaggaatttattgatgacttacagtcggcagctcaattcccaacaatcgttcagtcacagctgtgaatggaagtccaaggatctagcagttactcagtctcacgcagcaagcaggcgaaggagcaggagcaagagctagagctagactcccttcttccaatgtccttatattgtctccagcaaaaggtgtagcccagattaaaggtgtgttccaccacacctttaatcccagatgaaaggcatagcccagattaaaggtgtgttccttaactcggagattcaatcttctggaatccatagccactatggctcaagatcttcaaaccaagatccagataaggatctccaagcctccagataagggtcactggtgagccttccaattccgaattgtagttcattccaaatattgtcaagttgacaaccaggaatagccactacagagcctgtccagcttccccagaatgtatcaggtgtgcagctgggtctccaaccacagacgccctcatagccccactttctgtattctctcctacaaggaatttttaatgatccctctctctctctttttatttatttaagttggagagataggaaatgtgtatggtcaaggcagtcttgtcccatgttctccaaacatgtccaggacccatggatgaatgagcctggtccgtcctagcaaagtatctgctcctgacacttcccccaaagaacactgacacatgttacttacagagctgggactttagaatgacctaagtcatttccatggcactcatgaccatcactggagtcactagcacttagccaaaatggcagcataggtcctagtttcccaaggtccccttgtccatcacactatgctcctgggtaccggggatggtgtcctgtggtgattaaaagcttaggctgtagagtagcttgctggggtgtgagcattgttacatggggctaggatccaaaggagggaagagtaactctgtctgctgtccagctactgtgtggactgagatgatatgtttagaggcctatatagaaaatccccaacagatggaagctattaccccagatccacaaaagcctggggctgggagggccttctagaagactccacacacccagaatctatagaccatctgtagctcagacctctggtctaatccctggacttgaggccatttgttagcaagacttccaaggctacaacctgccctggattcttctcttggaaatttctgacttggtaggagggtatgatgattttcataagaacctttggtcacatttggtgtgtttgtacatggtatggggatacagagagccccagacctcacttgtgatggtcagaggccccagctccaagccaaatccctaggaaatcttgattcctgggcccatcattcaccacacaagagatatccctaatctgaactccttacaaccaggaatgttcctgatgtctttcaggtttgagtgtgtctttatggatttgaccccttgaatattcctaatgtgggactttgaaatccagaaatattgtgagcagtctgctgatacctagaaagcatgggctctgtggccatttttaaccctttccatctctactccagctatcctgaaggcagcacagacattattattcccatttcctggttgggaaaatcatagacctattgatgtcttatggccaccaagaaggaaatcatgcagaaggacataggagagcagcaagatcataacccagatgtgcacacagctgtgcctaggttttcccattcaggaccatctatgatggatccttctatttccttggaaaccagaacttggctgagattgtgggcaaaggagtcatccagcattcaattacactaatacctcatgctaggacgacagggtagaagaatagaggcagattccacgagtcctgccatcagtctctgttcctcctttccaaccctaaagaagataagacaaggcaaattcttagccaggaggccatattgttgtgagacagagagtccctgggctacatgagtgcccaggccttttcttttctttacacgtgggcttcaggcagctatccggcaaacctaccagctgcacactgcctggctgccacatgcctcgctgtacacctgctggctgtacagacagccctggaacatgagctcttgtgggaaggactctgtcattcattcttcaggaaagtcacttgttggcatggtgtgagggagctgcctcagattgccttcctgggaaaaagatgggagctggggccatttcacaccaggctctgaggcaagctccgatacaccaatgccattgttgactagccatagtgtccagcatccatggggtaatcaggaccaaaatgtacctgacagaggaagaagtctccagccaaacctgaatgggagagctagagacctggaagactaagaactggaacctctgaacaaagcaggagtcttgtgaggttgcagggaaagacaagctcggagacaatgcttggtcacgatggtgacattcatggtctggagctttggcattggagataacaaaggagccagggatggtgtctgaggaggaagggagaagaagataggagggcaatgtgggacagaaactcgacagcatttcccacaggagacagaactgaaaaggagagggaccttcagaggtctagctgtggcgagattttttttaaatttttatattaatttaatcaaaatcgcataaggataagcttaaatgtcttctagtacagtgtgccttctaataaaaacagcagggtcctgtaccattttcctccacttcaagacaccctcctcctctaattcctctggaatttaccttctcagttttagatcatagctttttagattgttcacttttaaatattagcatgtgaattttaactttggatgagagaattcagcatctatccactctcacctactctttgccaccacaaacaccaggacacacgtacaactacacacatgtacacaaacacatatacaagcaccaacacacaccactaacattccctaacattccctaaagcatgattgccttcctgttagctaaaagagtatttaatatgttcaatgtagtgatactgtaaatgttactgatagatgcaccacatgatatactgtgctgactcttgtgtgttttagaatttattcacttctcttatttgcctcttttgtgttccatgagcttatcacttatctgcccctaaatagtctagcataattgaatacctattaggtgttcctttaccttctttccatattggaactgtttggtttttttcatggatattggtttttgtctttcttagtttctatcatcattttgatagaaaattcttcagttatttctaggaaaaggggtttatgggggaatttttaaaagcttatctgggaaatgtgtttagttttcttttttactcattgatagtttggctgggtatagaatcagtgttcctcattctgtgaactccttttctgttttgtacctgttcagcctataatgttaagactctggatggcagcttgactcttaatctcctgtgtgtgggattttgttttctccctatttctggggttttctttccttcatattcatattttgaaacatcttagttttatatcattgtacaggtctccccctgaagggctcatgtccattggatctggaaggttttcctgttaccctgtatgacaagcttcctgatgctacctctctgtgaactcctgctttgggttggatctaagctgttcctctaatgtttttacttttctccaccatgtttatctttgagttactttgctttggaaaaaaattttccatttccaactcttgtgttgaatttctttctttgtccatttgttatctgtcatactagggattgaagtcaaggccttgcacaggctaaacgagttccttatgacttagttacaccctctgcctctctttgtctcttctcattttgagatagagtctcattaagatgtccaggcaggccttgaacttttgatcttcctgcctcaaccttctgagctgacctttgctttcggctggactcttcttcctcctggaatttcctacttcaaagaggctctgtcctgactctggaatttcaagacccaggttatttcttgtctccctctacccccttcttccgttctccctggattttgaaacaggcttctgctatgtagcccaggctggtctcaaactggcagcaagtcctcctacctcaacctcccaagtgctgaaatcccagccgtgcactgccccaccagctttctactatttcttcatgtataagactgtgtttcacttcctgcccactcttcatgagtgcttagggtatatgggggtgggagcttgtttactagtggtcttcaagattgggcaagacttccactgttgctttcagggaccccagacatgctactccttgagttttctcttgggctggttgtccgcatcccacctggatgcccatcttctaggctgactttcaggcctgatgaacatgagagaagtagaaagatgagactcactcaagcccttacccagatctgagcctggagtctagatctccctaacaaagccctccagaaaggagcctgcagtctgctgtgaggattggagacccaacgttgcttgggccatacgacctggtacctctctttccatcctcggcccttacacatcccttcccatgcagcatgatgtggcatccacagatcctgtgcttttccaagcactgcctctttgcctcctaaggcatccatctgtttccagtttccagagctacattggcacctctcatttgctgtggtctcctctcctgttctgtttgcccttgtggatttatgcatgtttaatttgcttattgtcatcttggggagggactgggaccaacacagaaataaaagaatgtgttcgtctcccttgtttgctgggaagcccctgattctttaacaatgtttgtcacatgacttctatagacaagagactgtcttaagaactgaaagggggccaaggcaaatggcagaaagaggtgggagtggaagtccagggccactctagcaggtcacaatcagaagcctggtggctggtcaggaagcatgtttgtaaatgtccacacagtttataaacagtccatgctgcatagcagggcccagagttgtataaatcttctatggaggatctgaccattgaggatgcctgcccagggaggagtcttccagctgcatcaggttatacacatgccatcccctgagagagaggagacagtggtcaagataagagatgtcatgccatgaattctcctaggttcctccatagagatgggccacagatgtacacatgtaggtcagtgcccccataacagtgccctgtctccatcataacaggaccacttctgatctatacgggccagtgcacatctcctgtagaccctattccttcccctccatggtcctagcaggtaacaatgcatcccatgatggcagtaggaatgccacaaaggcctctggaggtgccaccaaggtactccatggaatacaaaaagagaggtgcttccctggtcctgagagtctgactgttcaaccagaagccttctcattgcctgaggaagtactgggtattcaaggtaccccattgagtctaaaattccttcagggttaacatgttcatctgtcctgtctcctctaacctagaccagccttccttagactgcatccttgtgtaacctcttccccactcctccatcttaccctagggatggctcccagcctctaaacacctcccatgttccagaagggtcttttcccaactcagatccaccaagccacctgcaccttgtcagaactccatctgtctggaatttattaccaatgcattttctaacaggctctataataagatattaaagactatagctgcatctagcaagcattccataaatattaataatgcctttagagatggcacctaagcagaggtggtagcgggtttggctggatttggtcaagggtacagaattcatctcactcgagagggttccccatgatcacaggaggtgtgaaccttcttttctttctcccacctgtctttctaccattttaaaatgtcctgtcttttttattttatttttttattgagacagggcctcctgtagcccaggctggtcttgaacttgtgatcctctttcctcaacctcctcagtgcctagattatagatgtgtactatcacatctggatttatgctatgctgggaatagaactaagggctctgtgcatggtaggcaggcaccctactcactgagctacatcccaagccaggtgttttcttacgtcatttcctttgtgtaaaactttccctccatggtgtctttttatcttcctggtttctggcccaacaactgtgtccctggctcctccaatgccatcttctcctttggttctcttttccctttggaccccagctctgtctctttccttgtccccaacccactcttctttttgtctgtctatccttctccctcatctttctctcctttctcttttcctctccaaccttccacccattgtctccccttcctccttcccctctccctggcagtgtacagctcccccccccccccaccatattactctgttccagtgagcaccctaagccacctccagaaaagcccggagtggaatgtagctcaccctgcacgagagaagcaagccattcatcattattattaacgaacaagatcccgagcacggcagaactttcccggagtctattcccttgtcaccccgaggagtagcaacaagatttatttgtctcagaattgcacagggtggcccatttacagcaggcccatcacaagtgatgtggtgcttaaatggggactggaggaggcagaggcctgccctgcctgtgacctatgtggtatgggccatttgctcaaagggacagcctgaggtctaaaggggacgagggctatctagccatctctccaggtggactgtgacaagtgccagatcaggctgatgcttgttcactctgtcacctcccacagccgtgcgaatcaccgcagtgatctgtgtagatctgcatgttcaaaggcatgtccagggatagttaacaagattctactgccagcgtttactagaccattcattcttgacttagtgcctccgagcgcagtctgcccgggacccgtggcctggtacttggctctctgtgctgactgtgggcgctaaaaggggagaaccccagcaggagaggtcggggagccagtggcagtgtctgaaaacagggaacacatgcctgatgcatgttctagggctgcggaacaaagagcaggaaggtgtctgaccacaaacacctcagaaggcgggtcccacacggtggccaaagggatgtgtgaagaccagtatgggaaggaccagtatcgtctcctgcctcacttagatagatgttcccctcacttgcccatacccatccaatcctaagtggaccacaaagatctttccgttgaaattcccttagtgaattgatttaatttctgagacccccatctgattggcctgtgtaggtcaggtggttagtcctgcaccaatcaaatgcatcctgggtctgaagttgctccgcctttggcttggtgtcacctcttgagcggagctggggagggagtgtggtgtaggaggcactttggcttctgtgggaggttaagagaaatccatataagagccaaagcgcctggtctgctgtcacccatcaggagccgtggtgagacctggagcagaacctaatacctctctagcctcacttttctcacccgtcaataacggaactggcctggattatcccgaagcttcattgaaggcagtatatccagaatggtctgaagtgagaactcgccttttggattagggacttccctggcttcagacaaccctgcatcataggtcccactttctcctcctctgacaggctctgcacccctgcagggtctccttgggcattttcccagtttttgcagaaaccaagaaccaatacacagacagattttctatttgaatttttaaaaattggaacatttatttgcctgcatgtacgcgcgtgcgtgcacatacacacacacacacacacacacacacacacaggaccactgtgggagttggttttctccttctattatatgagtccgaggaatgaaacttaagtcaccaggtatggcagcaagtgcctttatccgctgagccatctctccatccgtaagatacctgtccaagtttgtgatgaaatacatttataggccaccaccaccatcccctttaagtatgtggggacagcctctcatctctccctgcctgtggtgctatttcactgatagtggtgttaggcagtggccatctgttgagtgttgttgcatgctgccatgcacttggtccagcaaaaagcacggccttttattcacatctcagttcaggtaattctttctcacatcatccttgagaggccgtgctgttaacagttccattttatacaagaggatgtggaagccagacgaggtagtgggagccatgcctgtggtctcctgggggaaagagctagattcagaagttagggttctgactcaaggtccatgctctgagcctccagggttcactgtctacagggaccagatgtgcccagcccctgagaatctgcttgtgctgagcctgcaagtctgtgtacctgtctgtgcgctccatggagcagcatctggtgctgggcaagctccagccttcgtgctgatcctccgtggagtggagcggggtgcctagggcctgagatgcaggaagtcagcactcctttctctccaatgcctgtccattctaagtttatgaatggctctttgccagggccatttaaaacctatcctgagttacgcagaaattaaatggcttttcactgtatgagacaacccaaggtcagttacagatggggctcttccgcatcctcttctccttctccagtgttagctcggcttcactctccactccccagatctgatgttcagagagcctgagagcctttgtcctagaccaggaggcaaggacaggtgaaaggccatctatctgaggtaaggcctcaggagctggcgaccagtggggccgtattgctgagctgtgtgctgtatgaggctggcgtctctgaaatgtgtctggacacttgtgtgcttcagaggggactggggaggctgaggggacatcgtgggggaagtctggcttcattgggtcctgcaccaggggagctctgtcttgtagctgtagatttgcaggtgactgtgatcatcagggctccaccagaagagatcttcttaggtagccccaataaaagtgtgtcagtgaagtgcccactttcaagagggtattgtattagtccatgtccaggactgtgaaaggctggagagacagaataagagggctggagagatgcctcagaggttaagaggatcttcttccagaggtcctgagtttgattcccagcaaccatatggtggctcataaccatctatactgggatctgatgtcctcttctggcatgcaggcagaataaatataataaataattttttttaaaaaaaagaaggctggagaaatgaatggctccctacatatacatgaggacctgagttttctccccatcagcaacaacgtaaagcttaaaaaaaaaaaatagatgtggcctcatgtgactataaccctggggcgggggaggcagaggcaggaggatcgtagccaatctacctgaaagtatcaactccaggttcactgagggatccggtcttaaagaatagaaagggattgaggaagcactagttccagcctctgcccttccatgcgcgcgcgcacacatgcgtacacaccaggactcaggtgcacacaatcgcacacaatcacatccaaatgtggccacataggtaggcatgtgcatgtgaagagagtgaagaaagaaattgacttaaaggaagggaaggtttatttgggttcacagcctaagagggttctgctcatagctgctcggcctgtggtgacttaggacatcatggagggaatcatgggctttgaactcgtactcagttcgtggtggtcaagaaccaggaagacggggaggggatgggaggaagggaaagtgctcttccgcctcccagtaagtagcaccccaggctgtggagcaaggatctttgacagacacacacggaaaatctaatgggtggaagaagataagggctgttgaaggatccgggggcaggccaagaagggatacactgccttccgcaaaggctccacgggaagagaaggaagcacggtttcagagccccgcccggtgggcggggctacagggtgggcgctggaggggtggagcctagtattcaggctttcttccctctgagctcctgccagtccctctcacactcctggttggtaatcagaacgccctaaacaagtcagttgaggtctggcgcaaacaggctaggcagagcaggctatctatcctaaggtatggaggcagagcagcctaaaccagggtgagatggggaatgaggggggggggggggggcggggctatgtggggaggtgggacggtgaggggaggtggggcagacaggaagtgcccagcatggtgccagtaacacttactgtgtctcttgagacctccctgtcctgcccttaggtggccctgcctgtacagtacaagaagagatctgataggacaaccatagctttttccttctgggtacttacaggctcgaaagtttatattagtaaagctgtaggtctgccctcttcacactgacccaatgagatagtattacctttagcctatggaatgaggaggaaggaacagagagcttaagtaactaacccaaagacacacagtgaggctgggattccaaccgatgttctggccatgcctgaatgctggaagttatccactctggccctcaacagacttgcttctctttgaagggaaagaagctaggatggggagagaggtgtgtaggaactgctgggttggggcagtacaaatgactccaagcatctaggaaatgcatgaaggataattgaggaccagtcttcgtgggatgttctatcccagagctactggggagccataaatggcgaacaggagaggggcttcctgttgcctgtctcctgttcccatcagcagatttctgggggatatcccagtagccccatacttggtggccaataaagaaatgaccagcttacataggaccttagtaactcagtggctgtgctctctagaagctctggttggcacagcacagccaatgccagtgtggaagggaagcctttgatgtaactgttgggatcatgtgcctagaatcagcagtacttgaacccaaggccttgctcacccaccttctcgctgtatagctttagaccagctgccctctctgtgccccccccccccgcaaagagcgtgttttctccaacgtgtccagagctttctaccgtgtagagaaatctgcacagccaatgatgagccagtgctgcggagatgagggtggatgggtgggtggtacaggcagacattcagaatatagcgcctaatgctgctgagatgtgcccttgtgctcacaggtgtttactgcttagcctgtgtgccagacaccatccaaggcagggcagacagggcctgtggcactacaggccgtgagggaagggtgagaactggccgaggtgtacggacagggatggtgagttacagaaagtagcatattaactgtcagtttgcagccttcttgaggaatgtggtaaccctgtctcagcctcccgaggaaatggccttaaccagccaccctgaatcagaaggggacatatttgcatattcatatcgaccagaccagtaggcttcctggaaggcttctaggaggtggaggcaggtgacatgctgtcaagacctggggatggcatgaggtgcccccccccctcagagcctccaagacacccccccaaacccaggtacacgcctcctacttttgcccttgaccggtccccacaggcagcttcctagtcaccctccagggcaatcccctgcagcttgggcagccaaggggacactggacaaaggaagcgaatccactaagaaatgggtttggggaccagaggcccctcttccaggactctgggataagcaggcagtcttaggagccagtgctcttacggccaccaggaggccatcaaaaaggggaaaagggaaatcatgcattttacattcctccaaacccgcttggaatggaaatgacaggccggtcggttggctgcaggggcgaggttaatggcctttgcggggcggctgtggaggcagctgcttctgacgaagtgagactcatcctccggtttcctttgctctctcacccagaacacaccagtggggacacccatcttcatcgtcaacgccaccgatcctgacctgggcgcggggggcagcgtcctctactccttccagcccccctctccgttcttcgccatcgacagtgcccgaggcatagtcaccgtgattcaggagctagactatgaggtcacgcaggcgtaccagctcacagtcaatgccacggtgagtcactgccctgggcctccagtgcccacctcctgcctcccctcatccggaaggaaacagggtattccaaggagacttgatttagctccatacccctcatgatttacaatcaagaatctgatcatgttaatagtgacaggtggtgtcattatgtctctgacgttgttcttagccctcagatagactttctagtagccttcaagaggacctacctactagtactgttgagatgcccattttacagatgcccacaagaagactaaggcataggggcaattcagtggatcacctaagtcactcctgtgcccagctgcagaggtcacaccagcaacctccttaggagggttgctgcaggtgcctctgggacacagaccagggttatcaactcagccgtgtcctgacaccattcaatcagggacagaacagtccaaacctgctgacaaaatccccataaatgcttccccaccaaagagtatccactgtgctaagcctcctgcccaaccccagggaattgcagggtgagtcggggaaaggaaatttagcccattttatgtatgtcaacattgagactcccacagtcgatgaatagtggggaagtaagaatccaaagccaggttgtctgactcctggtcctgggctctggctgccacatcccatgtccaggtgtctataggtctccagcatgcaggtaggcctttgatgatagctgtttgtgaggaaccgaaggctaggcaaggcatatcttaaacagggtcctagccccatgtgccctcactccagctgacacctaagaacacagcggcatcttcagtggcctgcaaagctacaagtgaccccacactccgttgtccgcccttcatatctgcttgtagagctcaggctaggagcaagccaagtcctgagatcctttcttcctctcggctccactggctttgaccctcagtacccagtctggctgcagagacggttcctgccctggccctgtgaggctgcagagaaagcctttggctttggcgccatgtggcagcagagttaacagcttaccccagaccccacgtggcagccgacatctcagattcctggatctagcctgggttgagggttgagaagaggagtttttccctcgggcttggtggagacctggagaagcccccagagccaggaaaagcaaacttcttgcctgactctctgggaggtccctgctgaggcatcttattttctctccttatagatgaattccctaggaagaggccaacataaaaataaaatagaataaaactgacttagggagtggagaggactcaaaagtctggaactcccctttttggccacacctactctccccttcattaattacacctgggcccagaagcatgcaggtgattgcttccattctcactgaagccgccctatgggataattgctgcccggcacacaaatggctttgggaggtaggactagaccagagctgggctcaagaaggaatgtgggtggctaggtccatccagaggccaggcttctgctgggatgatgcatacagtgagattgctggcaatctaccaacaatcaggtcctaaggaacctcccacagggagggaggggctgagacttcccagtaaatacccaccccccacttacccactcccccacaagctgtcaccaggggttccggggactggtgaatagccatctgtagctactgtgcactgaagagagccacagatcgcaaggccattcctgggggccatgcattggcctgacagccagataggtcctcatctgcatccatccctctttcttgtcagcatgggttacatgccgcaagtatacaaagaaatagattgtaaccacgggatgggatggatatcaggtaccaggctggctacttggtagcaagtgcaaaccaccagcatcttttactcaagagaaccagcttcccgggcccttcctgcatggctcatggtctttcaggccactggtatagtgtaccccattcctggtgctaccagacttccttcctgtgcccacatacttatctcttccctcccatctccaacaatcctccagtgccctccctgtctgtccctgaggtatctgagggatagccaggaagtcatctctcctcccataggctccatagcaccatctgcagagggcagaggccagtcccaggcttcattcatataatgggggtggggggggtgggggggtgggaaggggatgtcccagtggaatcaaggccaagttaacctggatagacacagttactcctcaagtcccagcagaatttgtaagcccaggggccatcgggccttttactagagcctttcatttcatacaaagggctttgagaatttgtcttacaagctggagactgcctgacgtgaggctccaaaccaaagctgttaaaggcagatgtttctacatgaaatgccccgtgcttgggttctgggtacttcctcagcagtataactgtagataatctgggtctctctgtctgtctgtctgtctgtctgtctatgtatgtatgtgtgtctcactctgtctctgtctctgttaaaccacctaaaagtctagcctgtgacagtgagtggggtagggcctacctaggccatgacagtccttgttatcatggcttttgctatctaattgcactgggctgttacacagccctcagtctcctgagcatttagggtcttggaacacaggctttggtgttcctttttcttactgggcttcctaggaccaggtttctgagtagaatggctctatattgcccaccctgtcccaagggcacacactgcttcctggaggccctcagatgtcacaggccctggagctccctctgctggtttgattagaaattactgactagcaaatagcatacagcggaatgtctcctacaggccagaggccccccttagcaccccctgacctgggatgaggaacaatggccctagaacacaacaaaaagttcttttcacatccaagctagtggtcctcccccccccgccccccacacattcaggagagctagtccttggccatggccctgggggccaacagagcagcctcagcccaagcctctactgtagcaccatcaggctcccctgcttctattttcttgaacatctcaggaacaccaaagaaccttcgtgctgttgggcctccttgcaggagtgtaaggctttatgtatgtgttggtggatacagaggtcacataccacagccctatgtatatatgcgtgggtgttcacaacatccttctaacccagggttgtgtgctcctgttctctctgtgtgtctcccaaggatcaagacaagaccagacctctgtctacattggccaacctggccatcatcatcacggacatgcaagacatggatcctatcttcatcaacctgccctacagtactaacatctacgagcactctcctccagtgagccccgcccccagccccagagcaggaagacaaatgcctgtcctgcgtgggttctctagcccgtgctggggatggctgtggacttaagctcggccaaacatccgtgttgctgagtcatgccctccacgaacctgctgccttcgttggccgtgtgtaccacacataatgacacagcttgctttcttcctgttgtgagacctctctctcaggcccaagctgttcctggtagctcatggatccatctgccctctttaatgactccttctcttttttggggggggggtctcaagttcaggtttcaaaaaagctgcatgattttgtatttacatcacatgtcatcagcttatcttttgattcccttagagcagtggttctcaaccttcctaatgctgcaggcttttaatacagtcctcatgttgcactgacccccaatcctaatattactttcattgctacttcataactaatcttgctactgttagggattgtaatgtaaatatctgatatgcactatatctgatatgcagacctgtgaaagggtctttggatccccaaagaggtcacaatctacagggttagggctatacagctgcacctggtcaaatgggctatgattgggagaaggtctcacaggacaaaatagatcatggtccaccccacaggaccctggctaaactatgagtgggtgtcactggcttggaaaccacctaactttgtgactgtagtggaatgcctgctacagcctgatgaaggagaatagggtgcatccccagacagacagaagcttcaacgtgcatcttggagcaatgtgtttgtgaagggaaagaaagggcttagctccgagggaaagcaggagacccttgcagagtcttaccttacccctgtactactcccaagcatggagagagatggatgtggaccgagttcctatgccagctcaggttgggagagcctggtcctgttggatgctaccgttgttctgactatagatatcccggcactaaagctgtgggttctggtgcttggtctctggctttgagggccaggtacgaaatgaagaatcttacaagcaagatgcagttttcttactattgcgggtgtctgcagctgcatggagaacagacagagccatctcgggctcaccgttcccagccttccctttctcggcctgcgaggcttatctggttaccagctttggaagtccaggctgcacgtctcagctcacccatatccagggactttcccttcctttctgctgccaaccccagccgtgccaggcctgtgtctcagcctcagtccagacctgactgccattttcggacaatttcaggcctgccacctatctgcaggcctgggcttcttttcctgagagctcagagctcatagggacctgactagcatctaccggtattgtgcttgcctgggattgtggttcagcagggatagagtctttgatgggcgtggtgtggtgtgtgagtttctatgaaatgaatgaatgaatgaatgaatgaatgaatgaatataaactctggtcatagcagccctcttgtgactctgtcacttaggtcactgacccagagaccacctctctccctcctttcctagacgctctctgtaactcatcctccacatcagagctagccacccctccctgctgtagtacagctaatttctaagctaaataacttatcagtcaattccagtctcatggaacgttcacataggaatacagactgctttgaatccctgcgtaaccctgacaccccatctttggaacattgacccaggatcctcttgggtctcccagcacactgtgtccaagagtgtagagaagatgcttcaggccaccttgattgctatgcaccatcatcatgttggttgggtcaccagaggaactctgaagagcccccacatggttccagagaggacccattctcacagacatcaaactgtggtggctggtgactgggtgggtccattagttatggggtgaggtatttgaccctgcttcatgccatggtcacaagtccacgtatttgaaccgagcatcctctgagtctccataacgattcctttgtaacttgcacaggcatttacatcaggtatcagagcacccccacccccaccccacccccaccccgtgcactcattcagtaattcagcctcatacccatctcccagagagttattaggtgccctgtatatactgtccagggctaagtatgctacacccttcttttctagagaattccatggagcagaccatttgcgagtgagtctttcttcgcatttggtcatctcatgacccctctgttccatttcctatgacttccttcccttagctcagagaccttagcatatcgttgtgtattcatgctacccatggtctggcaagttcctgagaagctactgcgtccatgctctgggggcagggtgagcgcttttacaaggggtgcagcccagctgaggaagacagatgaagcggtgagttgggtcccgtctcttctaagcactgaccagccccatagtcccattgtgcatctgcttctcttagctcccccactggaaaagggatccccacttccccatcccctccaagccaatccccacaagctccaggtcccatgtctccaggctgctaatcagtttccatgccttgatctggatctccgtgtccctttagtgtgacgcgctgatttcgcacactcgttccctagctgggtctgggctgagatgcagcatggcctgttccataaccctaggataggaggacccaggcatccctcatgcccagccctgtctccgaggctcctagggtccctgtcaagaccctgtcccgccctcctggctcccccccccctttatctgtggctcccagcatgtatacttccctctatcagtgtatcaggctagcaagcttcatctaaagtgtatatattacctaataaaatccttcttatttgggattattgcatcaaattttaatttcctcactcgaacagcagcatgtcagcctgcccgtcagcgaggggccgacagaaggtgaaaggcgaggacaggctgcacaaattactgccggcgatgcctatcagccctttgactggaattgactggaattaaggactgagaaataggattttctgcctcagaatctgctgtggcagctctcgttggaagtccccagtagcccccaccagccagcccccaccctagtaatgctccccccacccctcacacctccaaagcaaactgcatgtcacctgtcacctttcaagtccttaatcgtggcagggaaatgggggctggggtgtcccagctaagcttatacggaaggcaatggggagtagtccctgaggtccaggacagtccagtttggtccagaaacatggtttcttctagtgaagtcccgggttgtgccccacttcctgccctccaggcagagtcctggtcctccagtctctgttggaatggcaggcttgttccaggttcaaccttccattccccagttacaagcaccctgcttacccaccataccttgtgagcttcagcaaactcccgaaagctccaagaatgtgtcctccttgcagggggaggggttaggagcatctctgcatacccatcatgcccagcgcacggttagcacccaggggacgctcacttaaccggctcttccccatcgggtcccagctgctcaagggtagacaaagccccttagcttgggagtggaacctatcagagtgggatgttcagtatccgaactagttgaaggtgtttagaaatgtatgcataggggctggagagatggctcagtggttaagagcactgactgcacttccagaggtcctgagttcaaatcccagcaaccacatggtggctcacaaccatttgtaatgagatctgatgccctcttctggtgtgtctgaagacagcgacagtgtactcacaaacatacaataaatgcatctctttttttgaaagaaagaaaagaaaagaaaagaaaagaaaagaaaagaaaagaaaagagagaaagaaagaagtgtatgcatagtcccagacacagcactaaagtttcacgtgatcatgcagcaagtctagggcccaactttatagtgtcagttatatttcctgtgtatggggtggggggaagagggagtgtgtgtgtgtgtgagagagagagagagagatagagagacagacagagagagacagagagagagacagagacagagagagagacagagacagagagagagcaagcaggagagtgagtgtgtgtatgtgtgtgtgttcatatgcatgagtctatatatcagttgctggacagtagagcctgttatacccatttcacagatagaaaaacaacaactgagaagtccagacttacaggaatcaaccccctaactgcctctctgcttctcttcctgtcacaaggagtcaggcccttgtaggcctatgcacctgtcacctctttgagcagagccttgtttcccagaaggtcacctcttccccacaacatgagtgcctgaggaaggcaagactcccttagcaggggtccgtcttcagccctctagctggagcagggtctccctctccctctcctggccgtgcccctgggagcctcacttcccacagagccacacgctgcaagcgtggactcatctttggaggcccggctctgtgccagcaggctgcacttcctcctcgttccttgtctttggaaataagttgcagtatattgaaaatataatcactgagactctgaaacaagagccatgggctcccaggagcccccacacctccttgttaattccttctcataacgttttcaggccttctgtctgcacttgtattaaaagctcagagttttattaaaagtggatttatttacccaaaaagagatgaaaccccaaacctgattgggagcctggcagagcttgcccggcagaggctcggctccaactatggctgggagagggggccccttatcctcgtgtcccacagagccagctagcgtctgctgagttcccccgacacagctatggatgagtgggggatggggtctacagggctccgaggactgagggctcttaggccatagacttctctggacagcccagtatagctgccttagcctgtccccttgagcccagcacaacctacctgggatatggaaaagcatagatctgtcccttcagtgtattgtttagtaattcagccttagaactttagtgatctccgtgctcaggcatcctgataggtgggtccctgctccagcagcccaggggcaactcaggaaccctctagtaggacgcatgtaggcacccaggcagaatggaactacccctgtttctagaaagcctgttctggaagctaaaaccttgggatagttgtataccctactggaagtcagcccaggtcttccctgatggatagcgaactcttagatgagcagctatcccagaagagcctccagcagggtgatggaggaaagcagtgtagtccctttaagtcgagagctgtgcttccctgtggcttccatggaccggagtcaggggctgtccatgctccctctgtgagaggaagtttgggaggacaaggtgactggtctcccatgtgactacccttggcccctgctcagtctagaacacatggcatctccagggatggctggcaagtaggcatttccaaattccacgggaaccagtgcttagaatagttcctgccacagagcagtggcattaggaagtgacattcgcattattatagcagaaccctgcggcggccgcggcacctggtggacaggaacatcagacccttagcatttaaatgtgttcctggcttcctgttctttcactctctgctttgggacctccagcagtctctcagccatctgcttctgtttcttcatctgcaggaaggggctaggtcttaggacactggcaggctggggtacctgagaacatcgggccagcgtttgagcagttctctgtgccaggaaagatgtgctttacagtgtggtcagttggttctttacatggcctatttatccagcttcttaacaagcccagaggatccaaccaggatccctggaggggaggacaaagaagaggccaggacggcttgtcatatggcctggtctctgcatatatcccgggatattcccacgttccctcagggagctttgggtcattccgtcttctgcattctaggctaagggagggtgaaagggcttctggaaagagacatgcagtctgggaaaggggtttgtggctcctgttgtgactccacagccagactgggaggacttggagagatgttgttggccctgagacaagagaactgtctgtccaaaggtatgtgagaagcagacaagacctcgtgagccctttatacacttgtgagtgctaggatactttcatcacccccgccaaagacggagacagggccagtctgccgtcctttgcccaggggaaactactagggcatagtccccaaccttcctagtgccacaaccttgtaatacagttcctcgtatggtggtgacaccccagccataaaattatttttattgctacttcataactgtttgttactgttctgactcgtaatgtaaatatctgtgccctctgatggtctaggaaacccctgtgaccccatgtcaagacccacaggttgagaaccactgtgctaggacctgaacctcaggtgtaaggcgagcagggatcgctgacatatgcagtggtgagatgtcacgcagcctggggagcaaggtagaagttgctcttagcaaaggacatcttagcaagtggtggtcctggtggtgatgccattgttttccatagatacgtttgtttattcattcaacaaactgccatcctctgatggttacttaccagcatcccttcttagaggcttacacagctgagccctggcccgtgttacattctctacctggggctccttcccttttatttgctctccttggaaaactcctactaactcctcacaatccatcctaaatggtaccatctgcatgcccctttcgaggcttctccaggtgggctttggatacccactctgtcctgtttatgtctccatctcatctgccccagatgtgtgcggcagctgtctgtgtctgtccttgacccccttgctcgagtccatacttgactatctgtgtcgtggaggaatggcaggtgctaagcgcaaggccattgtgagtcaggagcaaagctgcatggtatacacacttcccaggcaagcctcgaagttccgaattaggctagggagggacagtggggtgctaggacacccataaagaaagatagctacctggcatctaggtgactgaacacaagtcccttctctctccaaaccagggcacaactgtgcgggtgatcactgctgtggaccaggataagggacggccccgtgggattggctacactattgtctcaggtaagccaaagcctgcgttgtttgctggatagactaagagagcgcctgttggcggctctggctcaaagagattgaatggcatttgagacctgcctccagggacaatccttgctaaggaaggggacaaatggatataaaatggaggaactgggttaaaaggccatggtgtctggggactctgggaacaggaatatgtgtctaaggtctgaagccgtgggccttctgaggctctgagcctaaaatactgcgacccttacctaacttcttacagggctccagggtgtctgttcttatctgctgaaaaggtggcaatttttacatcactttggaacaactagtattgctgctgtctgatttcacgttctagtcacacttcaatctgataggcagcaccgggatatcaccgtgggaggcaccttcgcctcttcctacccaaagatcccttggccgtgcagaacatgactgactgaactgatgtggaggagtaaggcaatgcctaacttgtgcctcaccccatagatggacccatggcggttctgagaggctgtccagggactaagctgcccccacttagaaacgctggttctgctcctgcatcacacgtgcctgctcacagcatctctcgctcagtgtacggtctctgaagggccagcctggtgtattcaggcaagccagacagatgaggaagtcagagtgtttcccaaaaggggagagaaaggcataggcatcaagggagacgggaaggtctcctgagccggctgtgttggctaggtctctcacttgtcagttgtgtattgggaacaggaagaatgcttgcgtcaagggggtttgtgggtcacatggcttactcctgtgaagagctaatgcgtgaacactttgtatgtatctgctcttgataataccaccagcagcggtttggagagccccttgcttctctagggtcacaggtagccaggagtgagtgttatgggccttgggcaacctatggttacatacaagactcctattatactgtgatcccagagagccccagggcagccagtctgcatggaacatctgtagaaattggcacttgatcccctgaatcccttggatgcctcctaccatgtccaggatcctttctgatgtccaggtcaggatccagcccagcacagaccttgatgtacactcacagaatgattgtcattctcgggtcccacccggggatggggcccactggtgtggtgacctgagcctcaggcacctaggcagtctgggctggtgataggggctctgtctttatgtggcaaggcccacctgccccagtcaggggcacagagccccaagctaagaataggcacctgcagttaacctgtctgaatctgaggtcctgtcccctctgggctgtttgtcagccacaagcgaggggatttatatctgcccacgagtgctcgccccactactaatgatccttctgttttgccaagagcaaagaggccttcagtggtaagttatggctccatctctatcaatttgttctcagccccgcgcggccgcacggagcctggtgaatggcaagcttctttcccgccaccatgggcaccagtagcatcgccctctccacagcaggctgcaaggaggctcctgtcccagcctgaattctgagtggccattccctagcctcatcctcctcttagcacaaacagtcctacttcaaggaacgctctgcctaccccctgtagagcgacgtgggtgtgagggctttgctccctgccagggctctttccgaaagatgcttgacctgctgcaggcttgatggtgcttacctataagacaaggttaaaaatcctggggttgtaggtgtaattcagcggccaaatgcttgcttaacattctggtgctatgtaaaaccggccatggcggtgcccacctgtaaaaccagtgggcacttggctggtggaggaggaaggatcagaaaggttgaggacatcattaggtgagtttgaggtttgcctgggctacatgatgccctgttgcaaaaataaaataaaataaataaaacataaaaaaaaataaatggagggaaggggaaaacacaaataaaataaaatgtagaaaaggagaagagaatccctacgtgtcccgatggctctgaatgaccataaaacactaaggattgactagtaattgtcagagagggatccttgaagctgattcatttcctcaaggtatggaaaagcattgagcaaggaccaccatccttcatgcgcctccaggcagactgcctagtacagcagcccccaaggccatagagcacttgtcccctggcctttctcaatggagaaggacagtccgtgtggcacataggactggggcatgactcggtaagagcccacaggcttagcttatgtgaggctccaggttctatgtgggcacgggcaagaaacagtatcagtgcatcccgttggttatgtgctaagatggtagcatttcccttcttctggcttgcccacagtccagcatcaaactcagtgttcagtcttagatttaagttgcagctcggctcagattgctatagaagaccctgctctagtgtgagccttccctggacttagttccagatgtgggccatgcctggcagggtactactgtgaggaccaagcaagccaagcaaaccagcagttggtcagtcagtggagcatggattccacagcaggtgctcacagaaacaggaagcactctcccttcacccaccacagttggctaagggctgtctaggtcaggaatatgatgccctgggagggcagggaccaggtaccatctccattacaagaacctgtacttttgccaggaaggtcgacttgagctgtgcagggactgcaaagatgtccggggtaactacgcaggatgcatgggcagtgagggggagggaagaggctgaggtgcatctttacagtggggctacataccagcatgagctggggctccccgggaacccccctcaactttcctttgtaagaagaaacaagaaaattctgtgagacactgcacacccaaccgttcggagtgggaaccttgctaaggtttggccgtcaaagctggcatgcatgggaatcacgaatggggattcacagaatgggcaaagtcatgggagtctgacacatctgtcacttacagtgactctgtggccgagcaaagagcacctgaggttgtgaggagacagactactgaaggtaacaggatcagctatgcgatgtgtggatggccagtctgggtcctgagagcagtggaaggccattgtgtcttcaacagaagaacaaagccatgtctgagctcggggtgctcagtaagtcgagagagtggggccagtggtttggagaagagcaggctgaagcaagcagaccagcaggaaggatgctataatgccccacccagaggtggtggcagccttagccagcagtcaaggcacaaggagagaacagagaatgagaggagggccaggaagctcccaggacccagcaactgatacccagggggcctcagccaaggaggagtctgattgctgtacaagcattcatgctttcctttcttctcagtgatgagggtgggacccaggtccttgcatatgctaggcaggtgctctaccactaaacccatactccatatgcccagctccctcaccttggaggcctgggcagaggaacttcacagttcaatgccagatgctacttgcacccaagagacacctgtctcccctggccaggtgagaagtaagtcactccttcatagctgtgaaaatcaaagagccccgtgtttactgtgctggcaataataagtcaaatccccaaagacaaactccacatggtgtgccttatgtgtggaatcctgacgaagaagaacttgtagtgacagagaggaaaaggctattccctgaggtggtgaggtggggggacgggaagatcctgctaagagggtcattcatcagagtaagtcctggggactgtcctctgcagtctgatgctaacatggtgcacgctggtatctacagaggatcgagctaaggtagctgcaccacactccctagatgagatcaaggtgaggtgctatgtgtagctgtcacctgtctatggggctcacagacagtgggactcatgtgcatctgtcaaagtaccttgtggcacaccttgaccatatgcaactttgatttgtccatcagacctctacaaagttgaacggaactggtttgaccattctgtaaaatgactgccacttggtagtcatctacagtgggtgacatctagttggtcctcaccccatgccagctgttcccctattcctccgcccaacaagatgcatcttactgtcacaagctctatcactacaatggcctctgttgccctcacaaccagaagctggtgaaggccttatttcaatagactctaaggtccactgtgctggctagcatcctctgagaggagggagcctcagttggggaaatgtatctgtaaggtagggctgcaggcaagcctgtagggcatttttgtttgtttgtttgtttttttcccatttttattaggtatttagctcatttacatttccaatgctataccaaaagtctcccatatccacccacccccactcccctacccacccactccccctttttggccctggcgttcccctgtactgggacatataaagtttgcgtgtccaatgggcctctctttccagtgatggccgactaggccatcttttgatacatatgcagctagagtcaagagctccggggtactggttagttcataatgttgttccatctatagggttgcagatttttaattggtgattgctgtgagagggcccagtccattgtgggtgggacaatccctaggctggtggtcctgggtcctataagacccagggcttagggctcagtggttaagaacactgactttttcctgaggtcctgagttcaattcccagcaaccacatggtggctcacaaccatctgtaatgggattcgatgccctcttctggtgtgtctgaagacagctacagtgtactcctgtaaaataaataggaagaaaggaaggataggagggagggagggaggaagggagggagtgggtaggaccccaagactgaggagatgggaccccaacttcatgtgccatgcccagcctggcttgatggtgagttcttcttcttaagagctaatgaaggagaggcatttatcatgtctagacagagagagaaaagacatgtgcccactttacccagttaccaagtgacagagcaggcattgaactgggctccagagaacacccaacttctgtgacaacagaggtcctcagactgccagcattgatgtcacccaagaaattgctagaaatgcaaaatccagggccccacttggggcaagagacactgatggtgctgtacctggccatgcgaggctctgtgtgctttctgtacaggtgatggctcctgccaagagtgtggtgtttcctatgtgggagggctatagctgccagcggccacgggttcctgggttcctgaagggaaagctgggggtggatagaaaggatggtgagagaaataacgagccaagacaaagttctctgatcaaggctcaactttaattctagggtctgatttttaaaggggggaaacccatcccctactttgccaggatctcgtaggtcactttgtgaggatctgtcatgaaaacaagctcagctgctcagcaggtagtggcttcttacaggaagctgcagatgtggcacacagtagacttcacctaggttggaagactccaccctaggtgggctagcggactgtggcagaaacaggtctgattcagcccgctcaaggctgggggaagtatcttaactctttttatgtgtgaatcgcatatatggtattgaaattgcccatcagggaggtaattaggaacaagggtctccagggactcatggggcggagaatgttgagaaaagacatttgcttaggaagtgctagtctataataaaagctcaataaggagtgggctagctctagccatcattcttcaccttagagcacaccagcctcatgtgcaaggtcacacaggggacaggacaggcacaatgagagaaggcagttaggtaccagactccttcctggatttgccatcaggtgagactttttgaaaatatatcatttaggggggaacgctggtgtgcatgcgcaagtgtgaatgcctactcatgagggtggggtggggggtgtcattatttatagtcagacttgtgtgaacccatacacacatacgacagcaactacatcaggcccctggccatggcctgctgggtcagccatcatgggagaccatccaccaacacacatcaaagcccttgtgattattgatctgctacgaactctcctccctctagggagagaaagctcagaaatagaattactttggaaatctgcatggcacacccagcctctggcttgtgtgatagtgctgtgggtaccgggaagctccagacttcagccctagtatgtagctgacccatggagacttggccaaggggacatagagggcagatcagaaaagaggtaacagggctgttggttgtgggtatgaaggaaaaacaatgggttcctggtcatagctggctggcgaggctagggctcgaaagatggttatcgtatggatcagaagggaaagacatgaatatagccccttaacaggtccctgtagtagctcctcacagccctttcaaagtaaagtctcaaggtatgagcaggttataatgacagtctgaaaatagagaatataaagaaatgaagggaaacacacgcacacacacatgcacacgcacacacacacttctaaccactgagccacgtttctgagtcctagtggaggcctaggttgaacgccttaaggttagcagatctgcttgtctctgtgagtgcccaccctagacccacatccacacctgcacccgaacaccccatccctcacccaggcagacatcaccagctgagcccggtgccacgatgggcgtctggggcctttctgccttgccagctgctatctgtcgataggctttgtgtctctctaaccacaggtgcagggaatgtgctgctgtgtgctgtccaaggctcagcgtgtcagcattccctggctctctttcctagacagtatttagggacgcagcctctgagttggcaagggcgaactgaatgatctatgcaccctgagtgttattcacagttttctgcccccccaataccaaaatgatggcattatgtcacactgtcatccattccttcaaatgaacccctaaagtctgcacactgcttcccctgagccttcccctcccttctcaggaccaccgttcccccaggatccccttctgtgatgctctgtgcatcaccatggtggcacctctgtcacctgcacaggctcatttctcctggctcgtagatggggcccaggagtcctttggccaggaaactgcagcctgccatttggcctctttcctgtgcatcacgcaagttggggagattttacagaggtttcatggcaaagactgagactccccttcctgcaccccatcttcctccatgcctcacatctcaggcaggaatagcccttacgtggggggtggggcagtggcctcccaggtgcctgctcccctgggcagatggttagatctctccactgctggctcatgagtctacttgcctccgtggacaggaatgacgtcatggacccttcggtttgacagctcaggatgggagctacttctcctcccacccagtcctggctaaggtggctacagcagtagaacatgggagccctcaccttcttcaccacccccacagagttctgcttgactttctcctttggctcattgggattttgccctcatctttgaatgaacttctaaggcctctctggtttgggaggatcataaagtagccaccatacatcatgtatgcagacatgataagggatagtgtgaggggctgatgagatttggtgagggcaggcagtaaggggcaaaaaggaagttgccaaggagggtcaccccaaatgagctctctgtttctctctctgtttctctctctctctctctctctctctctctctctctctctctctctccttggcatacctcagaattgatcaattctttgcttaaatttgtcaatattggttcccatgtggcagctttatttcattcttgactttatttttatttttgagacacggtctctctatatagttctggctgtgttggaactcactctggagaccaggctggtttcaaactcccagagattcagctgcttctgcctctgcctctgcctctgcctctgcctctgcctctgcctctgcctctgcctctgcctctgcctctgcctctgcctctgcctctgcctctgcctctgcctctgcctctgcctctgcctctgcctctgcctctgcctctgcctctgcctctgcctctgcctctgcctcctgagtgctgggattaaaggtgtgggccactactgcccagttcattcttcaatttaatgatattgtggacactcaagagcccaccagctctttgagagcaagaccagtactcacatctcacacctgcctgtgtggtcctccctcagcccccactttccctcctcgaggtcagctgggtcacaccttccaatcctccccttcgtcgtcctcttgctttggggaaatgtcacatccagatacatcacacactattcggatttagttgtctttgaacttgatgtttttagagtctcgtgttctgaagatgtgcaatttccactccaggcagaggcttcacattggctggcgtggcgtcagttgctcgttcatcttcactactgcgtattattccatccatgcagagttgtgggttttgctattctaatccacactgctttggccaccttgtccggctctctctgcacctctctgcacataagggacgacacattgccttggctatggcattgtctcttatccatccggcatgtggctagcaagagtccttctagagaaacagacattaagatgcactgagcatatgaagcccatttaagcacacacacaaatagccaggattcaacccacaagatctttgcttccaaaaccccctcatccttttgccctagacaccaggcaaatcatgtcagtctgtggtctatgtgcagggctggaagttaggattcattcattcattcattcatacatacattcagttaaccactggccccatactcagcccctgggaatcgagagctggtgtcattgtcctggtgagctcaccatttagtaaagaacatagcagtggtgagggcagtgtggcccaataggtgaggcgctctgagtagaacagcattctgggaggcaggtaacaggtgtgcagacatgcagggagcctgtgtcctggcaatttgcctccctgcttcttggctctaggcgctaatcaggtccctgctgcacccacctcggaaaatgatctcccatccgatatcccaaggggcctttgaacttgggatgagcctcactacccagcctggctcttggctcccttctcatcagatgcctcggatgactgctcagccttcaaggcagcccccagctggggctaatctgaaataaaagtttttatttatctagcttgatacctggtgcaaggttaaagcatacaagagagaaagcaataaaagagaaagattaagcgtaaggctcccgcttaggcctgcccttttgcaatatggttacaaagatattaagccccaagtcacccacagcaacccccctgccccccatcgctgttcttgagtcccgggctcagcttggctgaagtggaggggggtgtgaattggactacaggagaggaatccctggggtgccctgccaggagggtaagctaccagctggagctccagtccttcagccagtcagctgcctcctacccagcacatctgtgattcatggcttccctggggaaccaaaggggttgacacctgcacctatgtgactgccagcacgtttgtgtcatcagaattgatcaggagcctactgtggggaagagagaggatcccacagccccaaacttagccccacctagcctaggctccagtgccccatgctcttgatcaagcatgcctgctctctgtgcccccggctcagtagtggtgggaagagaatattttcagggctaaaggagttaacaaaggaataacttcccaaaacatgcccactgtgtgcctgatgcatagtaagcatttatgaaatgttgtctagcaatggcaatagcgagcggcagtctagctggtgaacacctacgagaaaacagttccctcaggctggagggaagggactggagttgtggcttggcctagcattcctaaagccctgagatccttccccagtaccagatataaaccagacacggtgggacactgtggcaatcccagcaactgtgctgcccctggtggggtggaggcaggaggatcagaagttcatggtcaattctaactacatggtgagctccagaccagcttgggacacatgagactcctgaaacagcagcagctgggagtggtggcctttagtcccagccctcaggaggcagaggtaagtagatccttgtgagttcaaggccagcttggtctacatagtgagaccctacatcttagttagggttttattgctgtgaagagacaccatgaccatggtaactcttaggcaaacatttaattgaggctggcttacagtttcagagatttagaccatgctcctctgccacccttcctgctagaagggcataaaaaaaaatgccacactggagctccaggctggtaacacactcatgtactccggagcccaggagcctgagctacaagtgccctctgtaatgatactgctggtggtcaagtgttgttttaaaaggcctggtgacttgtctcctggtgatggtttgattcttaaatgtcagcaagggccatttagttgagaatcacaggaacatttgacagcgagggtttgaagtcttagatttgctttttcttaagtcttcagggacagagttgcctgggtgtgtctcagtgatgcatagaggcctcagagagctgccagatactggatgtacagtgtggccacaggaagtcctccttgggaccagaggaggccaagggtggaagtagctgctgtgtctcccaaccgtgacatacatactcccaagagctgatggccagtggcagagcttgcagacacacggggatgaaatgactctgacgcgtggcaagctgtttattctcttcttgatttccttcactttctatttctgtcagttctgctcaggagagggtctggttgggtgctcaagtctgtaacacctcttagccttggttcagattgctctagagctaagagagcagaactggctgggccttaggtgataacgcatgctgctagccacagaggcaaaccataggccccatgtcttccagtcgcctctggcagggttgaccagttggctctttgtgacacttccttatatcccctttaaagtgattcttaaaagggaattattgaataacataggttgtacacacataagactgaagctcaaaagagcaggacttgggaaaccagcatgaaaacagagccttggtctccaagcccttcaagggtttgaacactaggaaggactcatggggacccttgtgggccacatctctatgtataaagtgcttaggactgtgtctgtcacagagcaagtgctctgggatgccagcctcatgtagacaggatcattgtccaagagccactatgggaacatgaaggactggcaatccctgatgggactgagggacagaaacttaagtggtgagactgacccaggaagaggaggccaagataaatgagggatgcctaaggcagagacagaccaactgggcagatgaggggagcagaaaatgaggtgaagcgcctggtacacaaggagttggaattggtcccttcttcagatgggaccagaagaaactaggcatgctcagagagctagtgtggcacttgcagagaggtatcaggacctcagtggcacccacagatcctgacttcagagttgtatctcctgggatcaggaatagggacaccaagtgtttcctcttcccctttccacatgcatacgtgtgtagaggcccaacactgacaccaagtgtcttcctcagtcactcgctaccttatcccccaccctcccgagatgggatctcactatgtagtcccagctggcctggagctcactatgtagaccaggttgtcctggaactcacagagatctgcttgtctgtgcctcccaatggctaggattgaaggtgttctccacagtgcctggcttccactttatactttgagctctttcactgaccctggaactcaccaactgaactgaactggccagccagtaagctctaggaaccagcctggctctgtccctctggtacttaggttacagtccagcaccatcacaccaggctggtatgtgggtctagggcccatgcttgagcggcatgtccttaaccaacagagccatctctgtggtcttttaaaaaagaaaagcagttgacagaaagaagggtgttgtatcatcttcagatgtaatataatacttagatcttaggctcactacccttctcaaacccacccctcttgccagacccctcccttccctatacagttcctcttctgtcttcacacatttcctccctnnnnnnnnnnnnnnnnnnnntctctctctctctctctctctctctctctctctctctctctctctctctctctttatttccccctcttccctcctcttagacacttactccttgctttgtggtcccctctctactttcatatctatatacatataatttttaaaagtcatttctatgcatttgtctttctgagtctggcttacttcacttaacatcataatctccagctccacacattttcctgtaaatgatggttccttcttctcttcaactaataaagttccattgtgcacacgcaccacctttcctccacccattcatccattcatccatccatccatccatccatccatccatccattcataagtctgttgacagggatctaggctggatccatttcttacctgttgtgaatactgcatcaataaacacagatgtgcaagcatgtctatgggatgtcatgtctgtgggatgtcatgtctgtgggatgtcatgccatgtccgtgggatgttatgtctgtaaatgtcatgtttgtgggatgtcaacttagcatccattcaacacacacctgagagtgacagactgggccatgtggaaggaagttctgctttcagggttttgaggatcccccatactgatttccattaacagctgcatgagtttatgcttctcccggcaatgggtaagggttcctctttatctgccttttccatcatgtcatattattagttggctttaatgatgctcatcctgactggggtgagctggactctcggtgtagctttgattggcatttactgatggctaaggatattgatcatttccccatgtatcctatcgccccctatgctttgtcttttgaacaccgtcttttatgtcatctgtccatggctctatttgggtgacttgggtttggggctgttgagttgtttggacttctttctatagtctggatagtaatcccgggtgtggtgtactactgaccattcttgctttctctgtgtgtctgcattcacttgctgttgcttctttaaacatccaaagaggtgtcttacttgctgaaatccaggcactgtcaagcagttccctctcagagtgctggggacgccccctccccacccccagcccatgaatgctgcccttgtcgtctgtggctatgctcatccaaccccttctgcctactcgcagccatctctcctggagccattgtgccctctgctccttcctaacacccttgtgatcatatctgggatctaccaagaagccacaatgatctcccatgttgaggtcctcctctggcagtaccctgtgacactcaccagttatcaggtcagggctaccttggtggctgccatacatcctacctccctcttcctagtcatttctactggctccctcatcgttatcttgcccaccatgactccaaggtgtcatctgcaccatgggtatcagctatctcgagagaggaaagatgggctaactgagtaccacaaacagtgcccatgaggtatcagggactggcagcacagcatgatgtcacccttggtcactggcttagaagagggcagtcgggctccaaaacacattattattattattattgttggtgataatttttccagacagagtttccctatggaggccaaactggccttgcacttaaatctgtcctcctgcctcagcctccaagtgctaggattatagtcatgtgctacccagctcagtcaatgtaaggtatctttaaagacagatggctgggcccatgagacagagaagagctaagctgactcaggtataagcacaggcacttgataaatggcattggtggcatcacaaatcaacaggcaaagggtggcttgtttagtggctggcattggggaaactagttttctaactaggaaaataaaataaaatcaagccagattcccagcatacaccatgtaccaaggtggactctggatggattaaagacctcagtgtgaaaggaaaaatacaaaactcataaaaggatgtaagggagtttatcttcctgaccttgtagtagggaaggacttgttggcgccccaacagcacaggccccgaaagtaaactgcctgagcatctgaggcggtcaactccacaggaatgtgtgagccatgttaatagctggtgatgtatggggagatgatttcaattaaaaccaacaagggactcatggatgcaatactcagtgaatccctgtaagccagtggttctcaactttcctagtgctttgacccttttatacagttcctctcctcccattgtggtgacccctaaccataaaatcattttcattactatttcataactgtaactttgctactgttttgaatcataatgtaaacatctgtgttttcccaatggtcttaggcgacccctgtgagaaggtcaaccaaccctaatggggtcacaacccataggttgagaaccactactgtaaaccaccaaggctgatttggggagttccttggaaaacaagcaaatgatattcctgcggtggggaatcccccagacttataggcagctctggagaatctgaaatcattagatattagcaatatgcaaatggaagctctcatggccaacctcagttccacagagataggggtgggggtagggtgggggtaagtcctcccactgtaggtgcatttattccttacagctggaggagggaggtaccatcactgaaccggctttacagatgagataaccaggctcaatgtgcctaaataacttgtccgaggccatcttgcttgtagatgtcagagctaggatttagacgtaggctagaggggagctggtgtgtttgggtgtgttgggggggggggggtggagaatggctcggcagttaaagctgttgatacacaagcatgaggaccagagtttagactcccccttcaggtgaggggcatggtaggccatctgcaattctagccttggaagaacaaactgggtagagagactagagagctctgggtttgattgagagaacctgattcagagaataaggtgaacgaggtagtaaggatgatttcaagcaccgaccccttgggcctacacacacatacacacatacacacacacacacacacacacacacacacacacacacactcacacacacacacacatactcacaaataaatatttgtacagtaggagagtaagggtttaaaggtgagaagagacccacgacctgacaaaggaaaccctacttctgctgcatcatctgcaccgactgtctccttgtgagtgggaagttgcttggatttctcaacccccatctgcagaatccagagccctcgcctcaccctctgactgtttaatgggcacatgatccacagagtcccgatgtatggccactgtccctgccttgactccaccccccctgagcaatgagagcgccactcccaggccacatgacagactgacactcactgaacagcaaatctggcactgggacactgaggtatagccaccaaggaaggacttgaaatcaaacaggtccagcttcaaaccatggctctcaggtcatctttctgtgagccctcaccaaatggcttctgcaaacagatgagaagcactctgtgaattactgctcacaagctccccatgcgcacctagagaagaggcgacatttttgttttgttttgtttaattttgttgtttgtttgttttttgttttttctgggttttggtttggtttggtttgatttggtttggtttggtttgcttttttttttttttttttgagacaaggtttctctgtgtagccctggctgtcctggaactcactctgtagaccaggctggcctcggaactcagaaatcctcctgcctctgcctcccaagtgctggtattaaaggcgtgcatgtttatttcacgtcttcaaagttgggtgcttggaagaacagggaggggcccctgctgtccttggcactctgcctggccccggctctccacctgcctatgtccctccgtctcaaggacttctttttgcattctcctctgccaggaagccttccctgagtacccatgtcccttatttcccatctctcttcaccactgtggcagccatctctcagtcatctgtcaccacccacccactctgagccctgggcagtgcctgctctgtcatggccacctagttgctgcattgtctttctcccagtcatgtggccacggaatccctggggacctacaatccactagctctagggacatgaactgctgagatgagatcccaaacatatgacctctgcatccaaaaaggaggggcctttccccagatgtccatttgagccaacagtgtgacaggcctgtctccctgcttcgctagtggctcacaggggctctagcaacctggtagtccaggctgagtgtggtccaggcaggagttggcaccaagtcacctactcccatatccaagggatttctaccatagccccaccccagccatcactatgccatggtaactaattctcttcctcctcttcttcctcctcctctccctcttcctcctccctcctccttctccttcttcttcttcttctttagatttatttattatacttatataagtgcattgtagctatcttcaggcacacccgaagagggcatcagaacccattacagatggttttgagccaccatgtggctgctgggaattgaactcgggccctttggaagagcagtcagtgctcttaaccactgagccatctctccagcctatgaagtccttctttaggcagggaaatcagagaccacatagccaactgccctccgaggcagggtgactcagggctgctggttggacaccagagctggctctgagtggctgaaatggatgctaactttccctggcactgagcagggtgctttggcctggctagactcacatacagtgtaaaccctatgggatgagaacatcctatgtctctcagccatagccataggtcaggaggtcccacacagggtgtcagagaaagaccctccgtgatgtttagttgtgtgtatctgcgtgtgtgctcagcatgtcaggggatgactttgtgtggcttgttccctccttccacctttttgggggtcctggagattgaacttaggtcatcaggcttatgtggcaagcacctttacctgcagagccatctcaaaagccctccatcttattttcacagtgagaatcagaatgccccattgcacagatgagaagactgaggtaagagaggttctgtgatgtttaggcttgagaccatgtggtgacaccacaaagtctaggtctctaagggtctcaagtctctttctcggggcctcttacctcagtggagtgtcagacagtccttgcccgctttagtccctcccttacagatacaacccagaaagcaaaacaaaaacccctccaagtcagctggttgatacagctgagctggcttccagtctcagttctgctcactggctatggaccagacagtggaagggttaccaggggaggagatgaagctagggttgtccgaggttagcacactaagcgagcaggagactagctgggttggctaagcaggaccatgtgaatgaggttgaccagcaatgctgggcaacagggaagaccatgtagagaagaccagatttgccctgccacatcagccctgtttctggagctgcccagaacttcttccctcctgggctggggccattcggtcgctgaggtcagatctttgtttgaaggacagataattaatcccacacagtaatcccagcactctggcagatttatggagatcgcctctgtcctgggaacatggccagtcatctttcatctcctagcaaaggtagtcactcgctagagctcaggccctgtacaagggatctcatttaagggagtcccccctcccgctgggaagattgatcacaggctgcgtggtggaggcagaagggggctctgggctcctcctcacccctggctctttgcctgggacaaggaggcacccagtcaccctcatacccagccctcccaagtcacaggcagaaaaggcagaggcagggacgggctctgctttttggtgtagtctctgagctccaccaaaggtagggaagaggagggcattgccagggctgatggtaactggctctccaagtcctgggaagaggggacacagacctcgggactagaatggttgcctctggtttgtggtttctgctacaagtttgttgggtgcattggaacactgtgattgtgattatcctttaacacatagacgtgtgtgtgtgtgtgcacgcacgagcatgcttgtgtgtattgctagggattaagtccagggcaaatgctaaacaaatgatcaccactgggttatttcgaaccccttgggtattttgagacgaggtctcagtgtatagattagaactgatgatccatccctctgccccagactccctccctggtactgggattacaggtaaatgtgaacccctacctacatctccttggatcatctggtgggtattcatcaagtacctctatgttgctgctggaaacacaaccatgaacaagcaggcgaagctgctgcccttagagtctagagggaatgaccaagaaacaggcaagcagattaacagtgagatcatttgagactagacagtgacaccgacccacagggagataaaacgagcgactgatctagaacacttagctggagcacttggggtcctctgtgataaggtagcttttgactgacagtaggaagcagctcagggtaggggcgacgacaacccatgcaaaggccctggggcagagacaaactggatataaacagattagaagaaaagtttcaatgaggcaggggctgacaggcaaggaagagttgggaagaaaaagcaaatcatattacaggtgatcatattacagtggggggatcttaattgacccccaagtactgctcagtagaatgagctagaacaggatgaaggagagtcaggagttagctgagaggctccagtggtggccagagcgggtacgcccatgtccctcatgcttacctacttagcatcatctgtctgggtggcccctctatctgcttcagcaagcacacacacacatacatacacatgcacgtatgcacgcagaggtggggggagggcataaccctcaccaacttagaggccaatcacacgcaccaagcatggtaggcaaagctggtttcttcccgatgtccacatccagtccctggtaattgaagccttacatcattttccttcttccccaggctaagccgatggcattgtctaggttagggctggcagaactgggcacatccaggacagagtctatgaggggtttggggagcccagctgctttaccttctaccctgttttggggtcatgtgggccctggctttgccaaagcttcctctacaagccagggacaaactcacccttttctgtggacacagtaggtctagaacagtgattcccaacctgtaggttgtgatacctggccccctcttggggatcacatattagatatcctgtatatcagagagttgcattaaggattacaacagtagcaaaattacagttacaaagtagcaatgaactaattttattgttgggggggtcaccacagcatgaggaactgtattaaagggtcttagcattaggaagattgagaacccctgctgaagagcttgcaaaaccaccccaaaaatgccacagcagagcccttgagtcctttccccttcaggagcatctgttcacaaagctgagagtggggtgctattggaaccccaatgtggagctggccggagaactgacctcttgctagtaggccaggccctgtagctcacaccgagagaaggaagcaagctggaagcccgggtgctgaatagggtcccaaattctgttccacggccctctccgtcaagagaaaccagaggctttgggaagatgctctcattttagctgctgaggtttgcccctgccaaaaccagaaggatggcccagtctatcctggttcccgcctgctcagcagaagctatcagctgccagggatgggagcactttgggatgcctgtccctccacttctagctgggctcattcatcaaatagtctccaaatgtctgcatggcctgaggcactgagccaggggctggggacattatgtgacgccggagccatggctcctgaggtgagacactgatgatttggaacagggtgttaaggcaggatgtctaactgcctgttctccacatctagccccagcccatgacccccagccagccctccttcatcctacaagcaggccaagttcacaggggactattggctgttaaatatcctgagacgccatcgtatgcaccactggtgatgtgcagacagggccacgctggcttcaggtcctctttgctcttttgttccttaagcaataaaacatggcagggattaaaggtctgctttgttcctgtccatgtccccagaggtgtctggggaccaaggcggagcccatgatgattccatcgctccaaagataaactccaactttaatgtggactgcgtctcagagtgtgggttctcatccatacgaagtggagggatgctggggtgtctttgcattctgagttttcctctgcagtattcaaagaggaaggcttgcttggcacacatgaaaccctggctttgatctctagcaccacacaaagcagttgtggtgatgtgcacttgtaatcccaggacacgagaggtggtcagtgttctctaaagctgaccctacaacctttgcatgatggttctaccaacatgctggcattagagttttgggtaacccctgggccttccttctttcagacagggcctcctccctcatggacaaattgtccttttttttttttttttttcttatgtgcctgattctgattcacaattagaagaagccaaggcctttgatgttttcctgttccttggtggacctgaacttcattcagtgtattgtctttccctctgtcattccagaccagaagcatccactctgatatcatactacaagtcaccgaccagacccaaaacacagcaggaaataggctaggcctaatctgagtcctttctggtggggtagaagaaggcagacccctttttgtagcaaggactctgggttcaaatctcagcttccctcagcaagccatatgacataggcaagttccctcgccagtgggttcggcaacagggtggtcatttcctttcttatcctgaagaagctaaaataatggtgaattgggcatgttctccatgctgaattctgtgctgccctggtcagcagtatgccccgttctgatccccctcatcagccctagaagatgcagactagccttccctttccacagacagggagactgaagtccagacagggtaagttactgacccgcagtcacacagctgggaaggagtgatgttgagatttgaaccctggtcctagctagtacaatatcatccctttgcaaggagaccaggtccctgtgaatgtgctaatcttctgaagtggtttcctggtcctcatggggctgggcaacatgaagacagatccctgtggatttttgggtgactgactgaacccaccatgacaggttagaaccagaaagatcctggacagccacctagtgctctgagcatgacagactggatactgggtgcctgcttgtgggcttctactaaaacatagatttcctaaaacagacatgtaaataaatgcccctatccgggctggggaagctagctgaattagagttcttgcttagcatgtgttagccttgagttccatctccagcaccttgtgaaactgacagtacacacatgtaacccagcaccctagagggggaggcaggagaatcagaaattcaaggtcatccttgctccacagtgagtctgaggatagcctgggctatgtaaaagcatgagagagactgagaaagggagactcgttgaacgaactgtacctccaaaagaaagccagtcccagcagggaggtgctggctcacacctttaatctcagcacttgggaagcagcggcagggcagacggatctccgcaagtctgagccagcctggtctacagagcaagttccaggacagccaaggctacacagagaaaccctgtctctaaataaataaataaacaaacaaacaaataaataaaaattagggagaggcctaaagcccagagaagcagagaagtcagatgtcttgcctagaaacaccagccgtcctgtgtgccctggacagacctctatcctcctttcaagcctcaagcatggctgagcctgaggggactctgcagcccctcagagactctcaaggtcagctagtggccaaccctgccagctggtggcctgcatctatgaagattactgtttctgggcctggctccctgaacctcgtctgaccacatctatttctgggctgcagggccctgacggagcacaatttgattcataaattacccggctcaaggtgtgtggatggattctccttctgcagacttgaaagtcattcactctagaacttgcagaacttgcagaggggagaggaggggagaggagagaaggagagagggaaggggaggggaggggaggactgtgtagccagtgggactggagccctcttttggagggaagagaatggggaaggcagaaatgggggtgggggagtctagatgaggggcagggagccatctctctgtgcctgctccaaccctcagacaactccggggacaaatgtggtaccagctctagtgggcaagttagaaaacttagactccaagggagcgtccgttgtccagtgccccatggctaggtgagaaggtgccaagacagattccacacccctgcgtgccctagctgcctgggtgcggccatgacagtagaagacaatacatagcctaaatgacaggctctggaaataagatagaaggaggagtcggggtgcaaaccacctcatcctataagcctcagtgctcccctaactggcattgcaaccaccccatccccgacctatggacccacagtctgtctaattcctcctacccaagtgcctcctagctgccatatttgagggtgggggaagacagggtttctctgcatagtcctggctgtcctagaacttgctctgtagaccaggctggcctcgaactcacagagatacacctgccactcttcctgagtgctgggattaaagatgtgtgccaccactattgagttgtgcctgcatctttgactggtacccattggatgtgagttcacacagacacacagacacacacagacacacacagacacacagacacacacagacacacagacacacacacacagagagagagagagagagagagagagagagagagagagagaactgagaggcccacaagcaggaaggcctgaagccaggcctcaagctaactcatacacggtcccttgtaagtgcttcagtgacctttagacctgtacctgttcttctaggagtgggcgacagaggggaatcttcttcatcaggtagtgtgtgttctgagaatgttccccatgccacctctatcttgtgcctgtgcccacacgcattgcatggtgggtaatctgtggcacccacatgccctcagaagttcagtcctcaaggccattgccatgtcttctctacatccccattgttcagagaggcaccaagggactagggacagactcctgggttgacagacagcaggatcccctttaaagcttctgtctccatgggtatttgttcagggtcctctttgttttcttaagtatggcccctcctctcacagcctctctctcacccctccttccatccctcctcccacctcccaaccccccttctccctcctgggcaaggcctttcagatcatcaaaagcaagtgctacttatgctggactcgagatggctttatctgagcagtaaatctccctaaggccagacctgtcctgagcaccaggctgccggagagttatgagggcctaaggcacacagcctctgggggtgtgactcacacgatggccccgggagagaccccagctgagggaggcaggggtatcctgcatacctggaccaggctcagagggcaaggaggggtgtagaggacctgtagcccccaccttttcctctcctgcctccgctctgtgactggcatggatgctcccacacagaacaagtgttacctggcagccagcagaactgtctcaaatccgaggtaccagattctgagcccagtgtgtccctttatcgattctgagcccagtgtgtctttgaggtgtcatctcacctgaatgagcctcagtttctttatctagtagacagcgtggctacatcagcctgataggaaatgtcaaggaactgaagggatagaacatgttgctccaggctgagcacagatgcagagagggaaatagcccagtgtggcctggagtctggctctgccatttgtgcagtgtgactttgagaaatggtgtgatctccctatgccggtcacgatgggatgatgccggtagtgagaatggtgacctgccccatcagagtgtctgtaaacatgactgacaaaaatgtacaggacacccataagcctcatcaggcacaagtgggccaatgcaaactgtcccttgctagtggccctccatcacagtccctagcccccatcccctcgcaggtcctcctgcttccatctgtggggacatgtcttgctaccgattgccatcagacagcagctagaccacattcaatgcctgttggtgacagcctcttctcctcccctaactccccacccccaccctctgctcccctcatctgtgcccaactctgtcccctacctcctgctgcaggaacttctgtgcatccccccaagcccagcaggggatgggggtggggctcagcaggcccaggtcctgcttcctccccatcatctagagtcacttgaaggcagagacctcacctattccccctcattcagtgctgttgaaggtagggccagggctgtccctgccatcagcatcacattcgggaattgtaactgtgtggtgactacgggtcagaacaggttgcatcccagggcagcaaatgtcagcaccatgttgggggactgctcctttagtagctttgagcacctagctgaatattgtgtcccctctcactggacacttaggttggctcccactttcgttatgaaatattggtggctgcatttgtgaaatccatgatccatcttcccctgaaagtccacccagttgctgaagaagcagaagttctgatttcagccatgatgcctggtgatgtcacaggggtcccccactcaggtatcttcagaggagatggggctgtgtctctaaaacccctgcttcacagggagccagacacagtgtgggtggagcagcgtagctgaccctcagcaatcctaacagacaaggctggctactcaagctaacgtttcctgcattagtgggcatggttaatgaatgaaagtcaggtatgtagtctcagtgaggtgatcgctgttagtttacgagagctcgtgaacgccatcctgaatgaggaaggacaaccagcaggtgtacctcacactatattccccctaccctggcccagtagacaagtaactctaattatttcacatggctcagctcaagcagacgctgtgttatggggacatcaagaaggatgtgttagtcataatgagaacttctaattcatgatctgcccataagccctgggcatcttcatgatgggtgactgacacagtgagtggccccaatactgtcattcattcattcattcattcattcattcatctatcccacagcatttattgagccaggtgtggcatacagaaggattccaagttcaaagtcaggctgggctataatagtgaaaaacctgtcgttcccctctctccgaaaagcaagcatgtattgatcgctctactgtatgtcagcccggtatttaactagtccctgaccttcagtggttacgttctggtgagaaaaacaaacagtgagaagaaatccaccaagagaagaaaaaagaaaagaaaagaaaaacaccccgagatcaatagagaagcatttggaaagcagtagagacgctagggtgtggggaggtgggctgatggtgactatactatgaggtgacatgtgatctgggacataaatacacataagccaacctcccccaacccctgccccagcaagacctgctgagatcaggatcctattccaggtggcttcaaggaaggctctgggaagggagagtctcccactcccaccccaggacctttgggaggggcggcaggctatcagctggtcccctctcaggctagtgacagggataacccacaccgctgcctgccatatgttagtcatggcgttgttgaataccacccggcccaggtgccacgcaggacctcggccccttttgtcagcaggcagatgaatagcaatttttaattcataagctatcttgcccaaagcccgtgtctcagaaggacctgcagttttcattatacagtgataaaattctatagcagccagaatgatagggctccagtggacagcagtgggcctgcaggctaggctgcctgggacccaaggactcaggaggagctatggccactcatgtaccctcgtggtgtgagcccttggcaagacagagcatggatcagagccttggaaaacaccccaaaccctatgacctcatgaatagcagtcatgcccctttggtaccttggtcactttcttcatcctgtacatgggcgctcagcagttggactctacctgagtgtccatgtaccaagcccaaggcacagagactaagagggaggagagagagactccatgcagttctgggaggaggtgggggctaactgatgctgggccagcacagaggcagagagaagggataacgccaccataggaacaaattctagctcagatggttacaagtgaatcacctttctttttctgcgtgaggtccagcccacggctcgattctggggataccctgccttctgagccctttctctggtcaccgctgaggaaggaaagcaaaaacaaatgtgtcatgaacatctctctggggacctccggggatgaagcatgcatggtaccccagacctaacccacaaggccaatgctggtagccccccaagaaccagggacaccccagcacagagaagtgctggggcagttctgagcacaccagcctgactctctggggttctgagcctctggttaagaggtgaggcctggttttcagggcaggtcttgttggccctggagatccagctgacaggactcgggaagggtggggcagagggctttcctttaattcagggcagagggagctgagagagctggcgctgggctgttagcccagtggagcagacaatgcaattcagagtcatcagcctgtgttcccacacgctccaccggccgctcacaagaccactttctggccagacctggcagtgccggtgatgatgctgcagacatgataagggatagtgtgaggggctgatgagatttggtgagggcaggcagtaaggggcaaaaaggagggtcaccccaaatgagctctctaattctctctgtttctctctctgtttctctctctctgtttctctctctctgtttctctctctgtttctctctctgtttctctctctctgtttctctctctctgtttctctctctctgtttctctctctctgtttctctctctctgtttctctctctctctctctctctctctctctctctctctctccttgccctccccaccttcctctgcaatcccacagaggtccctgatccactccagtgttccctgtggtggtggtgtgcctcttgcctgctttcacacctggctctcactacccgccctgccccccttccctggttaattccttttgaccttaaaatcattctctggggacacccaaagactctgttggtggctttagccagctcctcagccaactgagttcctaggcttatctgctgatatctttctcagggtcacgccctcttacctcaggacaagtggcacttgaggctggctgtccatctgtgttttctgacagccactggtgtcttctaagtacccctgcatgtccccagtggggccttagagatcagccctgctgaactggcattcctctagggccagccatgactctttagccgctctatgagccatctctccagctggaggataccaccacacagactctcggctgccatgtaaaacagttttgaatcatggagaatgtcatctagaactttcaaggaaataacttttatcgtgcatttcctttatttcaactgacagcggctccacatatattttggtatacagtgtgatgctttgcaatgcataaacccagaggataatcatcatcaaatcaggggaaattaacatatacatcaccttgggcacttaccgttccttcatggtaggaatattcaaaattccctcccctggctgtcttgaaatatgcaattgcatttttttttaaaccacagtcaccctgctgggcagttggacacatggtttattcttctcaacacactgaccagcctctccctgtggtccctcccacaaccttcccttctctgataatccctgttctgttttgactctgagacagacttttctggactccacatatgactgggatccagctgtatacagcttcctgggcctggcttatttcacttgatacagcctctgcccaccccaccccacacccctggtggaattttgtcttttttatggctgtgtagtattccattgtatttgcatgctatatcttctttgtccactcatttgcagatgaaatggacagagtccatatcctggctattgggagcagtgctgcattggtcatggaaatgccacctcttggacatgtcaatcccatctccttcttcatgtgtacatatgcagtaggttgctgggtcctattgaaggtctatttttagcttttaaagggccagccacatcatcattttccattattacagtactggtctatgcaccaccctcagcagtgtgtgtgtgtgtgggggggggggggtcctcttctcttcatttctttaccaccacttcgtattatgtgtctttttaataaccattggtttgttgctgttcttgttgttttcccgagacagggtttctctgtgtagccctggctgtcctgaaactcactctgtgaccaggctggcctcaaactcagaaatctgcctgcctctgcctcccgagtgctgggattaaaggcgtgcgccaccaacgcccggctaataaccattgttttaactagagcaaggtggcagctggctgtggctctgcccgcactccctgacgatcagaggcgctcattatttttctatgtgcctattggccatttgcatattaccctttgaaaatatccattctgggctttttgcctcctgggactcctgagagtctttgctccatcacacacggccggccgggtacaggtagatgcagacggggagtggggagaggggctgaatgcacgtgagaggagagatacaccttgagttgggctggctggggttctttggggggcatggtatttcacacctgagcctgctccctctgtctcttcattgggtgatggggcggtggtagggaagaatttgtaattacagtgtgggcaacaagtgtctctgtttgacacactggggaccaaagtctgtgtcccctttttgcagctttcccttcatgcagagatggaagccatgtcctcccaggtttctgaagcctctagaaaggtgactcttcctcaggaaagccagagggccaggggtaacccattgttgtcttgtgacatttcgactgacagtccccagaatccagattcctcgggctgaagctccactgtcaccctagagcctcacacatgccaggggtaccccacactagggacgtcacatgttgagaaggaagacggcttccctcctgtccagcagtgggactaaacaggtgacatgagtcatctgggcttccatgtaacttggatacaaccgattgttatgatggatccatttcccgaacagcagagaaacgctcacatgtgtgtgagtgagtgcaagtgtatgtgagtgtgtatgcatatgtacacatgcagagtgcacaatccctgggagtaaatgatgctgggagcaaaggctggagcaggggcatgataccctgtggacctggacatctgttcaaagactcttcctcacagcaaacaacttgcaaaggggagccttgggtgtggaattcaccatcaagggtgtgtccccactagacaaacagggataggcaagggccccactggatggtgcccagcaccgagcagggaccacaacagttgtcttagctacatctgggcagccaccaattggtgggcacatcccataatccaggctctgtcctgacacatcacacctcacacaccttctgcagggaggtcgcccacttgctccatttgcagactaggagatggagttacatatctgctaagaaacgactaaggtcacacggctagtatagaactgagttgatcccacgcggccagcctcctgagggcacaattgcagcctcctctagtctgcttttcctctggagcctgagcccctggagggctccttctgtcaacagcgggacagtttcataaagagcagtccttgttgtagactgaaggcaggaccccacacagatggccctgtgcctcactcatgttcagagctcaagaatgaacttaaagagggtaagtgagggggctagctgatgaacatgacctttcctacacggggctcacttcaagccagtgcccaggccccacagcatcctagtgagtgctacggttgccatggtgacagtagcagcagccaagtgagcacctcactcaggtggccttggcagctccctgggtgtagctgtttttgcctgctggccttaggagcttggaagaaaatcacacagagctatggaaagtgtatgtgtgtgtgtgtgtgtgtgtgtgtgtgtgtgtgttagcatagcatgctggggaaggtccccagacttctttgagtgtgtcccagttagcggtgtttgtcagtagacttattggaaaaggtgctgagtgtctcaggttcagaggacagtgaggccctaagtggaggggggaggtgctgggggaggggatgaatctgaacatgccggggtcagaagccctagtaccccaacccaaaccttagcaagttgctcagcaagaggtgctctgttttctgaatgatttatggcgaaatcttacaaagatcaaaattgaataatattcggttaaacatttcataggctcctttattggaaagaataaatggatatgaaaatctggagtgacgggaagctggcgctggggcctggggatgccagggcctatgcgaattgaggagggacaggggaggaccagcccctgtagatccatggagtcctggcttcatcccaccgcagtcttgtctggtcagctctgctgtgaggacctggtgaggactcctcctccaaagaatgtgcccctaacaccaagcagaagtgggccaagaaagaatgaatgagatcacacactcctatgaatgagtgaatgaatgaatgaatgtgagcatgtaatcctatgaatggatgaatgaatgagagcatgaggtcttatgaatgaatgattgaatgaatgaatgaatgaatgagagagagcacacagtcccttgtttcctctaataagctacacacagtccctcatttccaatagcaaatggcctggtgatagccatctctgtgtctcctagtaccctgtcctctttacacaaacaccgccacacccaccagtctgcttcgtgggagaagcatcaggcaggagcatgtgggaaggcattcgcagagctgaggccaggtccagattccaaagccacgtagaggcaagccctgcaatggctgagagaccctgagggactcctggctgacagcccactgactgcatgagcaggctggaaacaacccctgtcctgcagccttaaagacagaaggagaagccatctcccctagactttccattgttggtgccttgaagtggagacagggaagggcagggaagcttaggtattacttcttttcctgcatcacagtcaggacagcataaaccaagcaagcagttgtcccaaggcagaatgtctcctcacttcatcttcacatgggctagatgccagtgttagccctgtttacaactgaggcacagagaggtaagtggtccaggatcacacaagagcatcagccctcttctccccgactgctttccctcttcagccttcccgtctgtgaacagtgttgcctgctgtgacctcagaggcctgatctgggggaagagcagtgtgggttccttccaaactgcagcttcattcagcctgagcccacagtaccaagctcaggcctggccacaggatagcccatcctagggaccgcagaactgtgaatggatgcagcagagctgggaatgaatgagccaactggttgacacagcctggcgcagggccataaagaacggacagtagtctcccagggctgccctaggaggcctaaggaacaggtactcattcatacagatcaaaatatgccaccatgcgctatcacagtgtacaatgacaaaaagttcttgtctcctgggagttcataggccagacaggtagaggagtcacacagagaagccagaagagggaccactgcctgtgggtcaggagagttggctgggccatcagcagagctctgctggaggagaggatggctgggtaggaagggtgggagatgagagtagaggaagccaggggatgagagaccagagcaagaaggaacatgtgtgaagcccagggaagctgagggaagcggggtgggcacagtgtggaagcagagaagcaggaagcctggttggcaggggaggcacagagacttcggggcctcggcaggaggccagaggggctcatgtataatttctgtgagtagtttaaataagtgtctttaatttagtaagaacttaggatattctttaaagttgaattatgttttaacatattcatcatttctttttcttttctttttctttttttttttaataaagcaaacccttattgccatagaaagtcaggatggaatgactaggctagactagaacgaaaccgtagaataaacagaaggcaggccaatgagatggctcagcaggggaaggaaggcccttgcctcacaaaccagactagctgggttcgatccccagtgtagaggtaggaagagctgatttcataaaattgtccctgacctccacatgcacactttgacatgagtacctttatacacactaaacactagtagtaataatacaaattttaaattttaaaaatagtacaaaggaagccatgcctaccgggtcctgtctggattttgcccgctttggaaggctctgtgctaaaggaaaacaggggcctggtgtggcccagttggtagagaacttgcccagtgtgctccaaccctgtctttgagccccagccctgtataagccagctgcagtaaatgctgcaagtggcactctgaaggtcgaaggggtagggggatcagaaatctaaagttatctttggccacaatgggaattcaaggtcaacctaggctatctgagaccctgtctcaaacaaacaaacaaacaaacaaacaaacaaaaaattttttctttttacaaaggaaaatagtattcagtattaaaatttgccagcaccaaaaggagactttctcctgacttacagagggctgggtggaacccagaaagggcgcagtaatctgtgattcagtttctacccttggcggagtctactgagcttgtgcccctggagagcagtgtgtgccttcactctacgaccctctgtcagttcatcatgggctctcggcttctgtcttgcagggaataccaacagcatctttgccctggactacatcagcggagctctcaccctgaatggcctgctggaccgggagaaccccctgtacagtcacggcttcatcctgacagtgaaggtgaggcccaccctctggatgccacaccttctagaccactgaggaacctgagactatccccagcagtccagaggatagtcaggagggggaagggtggttataaacgcgggtctaccccgcccttcacacacactaccaatgtctgtcctgactggatctttgatttcccttttaggagtgatgtttccccagtttatcaaacagcaggctgtaagggaaggggtaggagctggggtccctacttggaaggtgtggacaaggtgccagcgccaggccttgcagctacctgccacttgtggccagtttgaattgaaatcaatggcttgcagagccattccctgggaaggctattgagggaatggatcctggtggagtggggagggaggcagggtaccaggggctgccaagcctcaggcatatatcagtggggggagggacaactataggcaaggggccttgagaaagatctgcatgaagctgagggcacagctaggtcttgcgtggacccccattggccttgagaaagcccaagtcagctgtgggtgtctgggttctcgtggctcaccagctccttcctttctacgtgttcaggtgtgagccagcccaggagacacgtaaacaaaaggtcccccatgtgcactagcctcagaccttcttcatagtctgcttcctctcaagagggccaaggggtctgttctagaggaagagagcccatccctccacccagtaccaccaccacctcacctgaggccctctgaattctgcgttcccaacttcatacaaaatgttaggtgactgtgctattgggctgggcatgtctctctctctgtgtggtagcagacagtctacccaggtctcccttggagtatctggagcagtaaattggggggtcagaactgggaaattagtacttggggacctgaggcatctttgggtccttttggcatctgactcggatcttcccaggcccagtgacgttgagaccacagtggggactcagttaagtcttgatctgtcagtagcatagacaaagcgctttattttatcattttccaagccaaatggactctctctgcacccctcagtgggtgatatctgtctggtcctcctgcccccctccttgatggttccagaagcccatcgcctaagtttgaaacctctggtacaaattaccccacctctgtgatcctcagcatctttgtctattccatgaatgcagacagtggaatcctctgcctggggccatggtggggatttcatgggggagtttacaccgacacacatgacagtgctgagaacgtcccaagtgggtaatagctgtttctgtgacttgttgacaccttcctctgtcttcagggcactgagctgaatgatgaccgtactccgtcagatgccaccgtcaccacgaccttcaacatcctggttattgacatcaatgacaatgccccagagttcaacagctctgagtacagcgtggccattacagagctggcacaggtcggcttcgctctccctctcttcatccaggtggtggacaaggatgaggtgagtgatggagctcgcagcccatctgcacttaccgcccgcctagtctaggcagcactagcaggggggccaggggtctaggctgcactagcagggggaccaggggtctgtgcagcactagcagggggaccaggggtctgtgcagcactagaaaggagaccaggggtctaggcagcactagaagggggaccaggggtctgtgcagcactagcagggggaccaggaatctgtgcagcactagcagggggaccaggggtctgtgcagcactagaagggagaccaggggtctaggcagcactagcaggaggatcaggggtctaggcagcactagcacagggaccaagagtctctgactcctacttttgatgtaatagttaccccttcctcactcacatggggacatgccttcctcatctcaccaactcctgaggcctaaggatgtttaaaagcagttctagcattttctcacattccagtggttcatactgtaccctctggagtatttgcagtgtagcacacacatatggacacacatgcatgacacacagtccctatacatgcatgacacatgatatacacatatacatcatacatacacaccatacacacaaatgcttcatacacaccatacatatacatgtactacacacaagcacatgtatggcacacatatgcatgacacaaatacatgcatgacatatacatgtgtgacacacacatgcatcacatacattatgcacatacatcacacacatagacatcacacatgtgtatcacacacaccatatacacacaagcatcacacatatatatcatacacggtaacacatgtatcacacacaaaccatacccacatatgtgatatatatatacccccacataccaacacaggcatcacatacatacataccacacacatgcataaaacataccatacacacatatccatcacacacaatacacacaccacacacacatgcatcacatacacaccaacatataccacaaacatgcaagacaacaccatacaaaccacacacacacatacacacacacaatgtgcatgtgaacctcagtgcagagtctagtccaggtttctgtggattaatgatacctaaggaacaagaaatgcccatatctgtgtagcatccaggatccagagctcatggaccatgagtgatcagctgaagagggggggtccctggggagaggagtcttgaactgagccaagccatccaggaaaactggtggcccatagaggcccagaggcaagaacctgcaagcagatggcagaggaggcaatgcagagtttgggctgaggtagaagcaagagagctgagacacttgtacttgatcttggagatagcacaggctctgtggccaagggacttgaggttaagcccctcttgaccagctctgtggccgaggggacattagtgaccctttcagaaattccccatgctcaggtaggtgttcaggaagaaagaaactgtatctgtccaactctattgtagcaacaagttagccctgaggcacaggctggttctggcaggttgcctgctcgtagtactagtctgagtgggcactggagaactcagtcagcagcttcataggtgcaaaaggatgaaggaaggctgtagggcagagacaaactccgctgtcttagaatgccctgagcctgcttgacactggccggtcagccatatcgagtctctggtccctcccttactacctgaaggctttggaacacggggaaagagctaaacccatgtctatcccagaggccaggatccctgcggaggaaaaaggaacatgcacaggacttggccaccctctgttcccaaggctgcagctccccagtgcagacagccctgaccctacacaggtgtctaagagtcagagaggtccccctcaccttgagggcctctgcaggctgcaagtctgcctgcagtgtgtgccaggatgctgctttgagtagctttctgttgctgtgataaaagcatctgacaagaacaactcaaggaaggaaggaagaagggtttctttgggctcacagtgtgagggcgggtcctaatggctgtaagagaaaggcaacattgtatctgaggtcagggaaacagaaacagatgaaaactggtactcagctcactttctcctttgtagccagtgaatcccatcagattaatgatgaagattaaccatcctgtggtgggtgggtattgggtcccaatctgcctttagtggacactccatctagcatagccacggacaggacctgaagccaagggcacttagagcaacagaggctgtccctgtcctctgtcatttttctccacagaggtgactttgtctctgataatcaagggcttgcttccactcagggtcctgctcttccagggccctgtgacacacacacagagagtactaacaaggacaggcagaccagagacacccccccaccccccacccagaggccatcagcccaccctcttgtctccattggactccactggtggtcaggctcaaccctcagagagaggggtagaagcctcactgctgatatggatgttcgacgctgtctctccttctaccctcagaaccctgaggggctcaggtctggccagagagcagcatccaaggccaggattctctggttctaaggaagaacactgtgaccccggctaagagcttaggcacccaggacaggaagaggaggtaccagctgcagcgcagtgtctagaattgggagcaggacacacttcttaaaacaacaaggcaactgtctgagcgaccgtcttgctgtgttcttgttctagcatttatgtctgagttcaaatctggcgttgagtttgcagcagaaaaacatttttcattaagccaattattcgagtatttattcatttagtggggatgggatacactggcctgtatctgtaagtcagaggacagctttgggaagtcagttcttccttgtaggttatgggctccaatcatgaaactcaggtcatcagccttggtggcaagcaccttttaccggctaagccatctctcctgctgaactgagaacatttgaatgcaggaagaggacatagggagagctcaggcctcttgtccaaagctctacagaaccacaggaattcgtgggctgtccccacaactgtggtcatatggtaatgagtgtgccagcctccctgatcttcactggacgtcccactggtgggtctggaggctgtagggtctacaggatgcaagacagggtttagtcagcaggtctccaatgcctcacaccctatccagagaaatgcattgctcaatatctgccccatagatgctaagcacagccagaaggtagtcatgggctccttcccagttgggttccagaggctgtctgggcaggctgacctcaatagtgtgtggtgatgaaatcggaaagggtagcagaaagcaggtgacctctggggaactttgtggcagtagtgcctccttagaatgctgacttatctcagaagagctaagatgtaccaccagtgcccccaaatcccagattctgcagagcctgccactgcgcctcgggctcttgtgtgctaagccccacactgcaggggctagaaagaggcccttgctcttcccaaggactcgcagcattggtctccagggagtgtctccttttgccaggctatagaacattcacagaaagcagagaagaaggagctgcagtagactggagtcaggggcagccagggttttttgtcctatataacagttgcgatgccaagtagatggttgggaggcagtggggcgagaactggagaaatgaaggttgaaggccagccttggtgggacccatctctgattcaaattaaagactgtggcacagtcactctctgcacctctgctgtttcaactgtcccatgcccagagctctggggatgctgcagtagataagcagagaagtgtccactcattcctagcccaagctttctctgggctagcctgcagtctcaggcctctccttcagctgagggttccttggaggccagccgtttctgcttaactcaaccactcttccacacagacccgaggaggctgcctgtgtggactgtttgtgtgggcatcttcctctggagcagtcaaccaacagagaggtgttgtgagacacccccacccacacacccccacaccctgcttcacctaatctgtctagatgctgtctctcctactccgctcttttgcaggaaccttgccagttgacctgcagagaaagtgacagcagagtgttgctttcttcattttttttcccaaagaacccttagcccccaccccccacccccaccctctcttttggttgtttggttatttggttggtttggtttggttgtgagccttaatgtggttgttgggaattgaatttaggacctctactcattccagtcaatcctgcttgctctgtcccaaagatttatttattattataagtacattgctgctgtcttcagacacaccagaagagggcatcagatctcattacagatggctgtaagccaccatgtggttgctgggatttgaactcaggacttctggaagagcagttaatgctcttacccgctgaaccatctcgcaagcccttagtttcatatttttatgtttgagacagagtcttgctatgtagctctctgcctagaaccagtgatccccctacttctgcacctagggggctagatctataggagtgggtcagtgctcctctaagtcatctcagagctctcagagtgcagctctgctgttctgtggacagtgtccttcagtgccctgacaaacccatcaggccctgagtcacacacagcttgttcttagggatttattagctattcttctctttcctgtgacaaaacaccggattaaagcaacttaaggaagagtttattgtggctcagggttggaggatacagagaagttatggtggcaagagcctcaggaagtggtcacagtcaggaagcagagtgggatgaaggctggctggtgctcagctcttcattcagtgtaagatactgctgccccaatgagtgagaatcttccccattcacagagatgtcctcacaggcacgcccagaaccttgtctcctagttgattctggaccctgccatgttgacaatatcagtgaccacagtgacagaaatctgtgatttaaagtggggatgtcgctcataggtaggacacttgcctggtagccacggcatctttgctctgctccttaacctgaggtgtgagtccatctgtgcctagcatcgcctctgggacccatatgaactgggacacgcagttcttttggtcttgggagattgcccggtaaataaacaacttacatagcaattatgagcaccacatggcggctcacggctctttgtaactccagttccaagggatctggtgccctcttctggcttcctcaggcaactgacatacacacacacacacacacacacacacacacatacacatggtacatatacttacatttaggcaaaatatctaaacacatgaaataaaaatgtaaaagaacatttaaagcaaagcaaaacaaaaaacaaaaccccagaccaagcagtgtgagcttgtcgtcctagtgctgaagagacagacaggaggagtctggggctctctcaggccagccagcctaggaaaatcagtgtgcttcaggttcagtgggagactctgactaaaaataacatgatcaggccgggcagtggtggcgcatgcctttaatcccagcacttgggaggcagaggcaggtggatttctgagttcaaggccagtctggtctacagagtgagttccaggacaaccagggctacacagagaaaccctgtcttgaaaaaccaaaaaaacaaaaaaaaaaccaaaaaaaaaaacatgatcagcaactgaagaaagtacctggcatcaacctatggcctccacacacatgtacatacagacatgtgtgcatggccacatacatatgcacacacacacacacacacacacacacacacacacacacgtgcacacgatccttgtatctttttctcctcttgaggcaggcttattgacgctaatgttgatcttgaacttgagatctcaggcatcttctaccacacctggctttaactcggtggacccgtcacaggaggaagacagggtgtggaggcttccggtgcctcatgtcatataccctcctgtcttagctggacctggtgcctctgtggctccccctgagctcctcccaggcaagccctgcctttctacatttggtgccatccaggatactcacataggtaggataagagagccaccaggttcaaggtcaaaagaaggaccctgaagcaaagttgctcttccatccctggctccgcccctttggccctggatggcctcagagtgacaacagaaacttcatggaactgctgtgagggaaagttagaacagaacctgcctcaaacccttctacccacgaggtaaccccaggctgtgatgtttgcccttgccaggaaagaaagattcagagaggttaaggggcttgcccaaggtcacatgacaaatagattatagtttgggtggaatttgaccttgaacttctgattctgcatttctcacttgtgcctcggggctccttggttggagatatggctgcccgtatctcaaaatcctatttacatccgaccctgctttgaaatagcagcacatggcaggcatctctgcctctaaatatacttgctgcatgaattccaaagcaggtagatgactgcacagcccctttaaaatacccagttaactgtttcaaaatagtcagttgacttggcatcccctttttattttattttatacaattaaaaacattccaatagagccgggcatggtggcgcacgcccttaatcccagcactcgggaggcagaggcaggcgaatttctgagttcaaggccagcctggtctacaaagtgagttccaggacagccagggctatacagagaaaccctgtctcgagaaaaacaaaacaaacaaacaaaaaacaaaaaacatttcaatagggtagggatgcggccgcattggtagagtaagtgactggtgtactcgaggccctgggttcagtcctcaacagcacagacaccaggtgatgtggcagtgcaggcctgtagtctcagaggatcagaagttccaggtcagcctcagctacatagagggtttgaggccagcctgggttagagatcctgtcaaaaaaaaaaaaaaaaaaaaaatagagatagatagatagatagatagatagatagatagatagatagatagataagatcggtgggcttcagtaggtttctaggaaggatctgtagcattaaaaaaaagaaaggatgagcaagccaggaggaggtggtggcgcatgcctttaagcccagctctcagaaggcagaggtaagcagatctctgtgagttcaagggcagcctggtctacagagtgaatttcaggatagccaaggctacacagataaactctgtctcaaagaaaccaacagcaacaaaaagggagataagcaagtccgtgcttcactgggagcccccattttcagtacctgtaccccccccccatgtgtctccccctccccttctgcctcccccacccctaccaggctttttggtttggttctttgggccccgcaggctctctcaggtgtaaatccagtcagcatcctcagcatgtctctgcatacctgggtgaagccaagacaccttggtctctgtcacacattcaactgacagactatcagtcagaccactgtttctctgagctctgtttgatagtatctccccaacacattgtttgtttgtggtgggcacagtaggcatacacccctgcctctttagaaagtaaccctagctaccctgaatttgattgtctaagccacttatttaggagcaaagagaagaaatgtgagaccaggttaccaatggtaggcatgtactctctgtgagggtgtggccatccattgtctaaccacaccctccccaacccttctaggcaagtaactaagacattgctgtcaatcaccatgaagtttgaagggagtaggagatgatatctccagttctgtcccctatccagtacccccaaccccctcccactgcctcccacacagagatatgagaaggagcaggggagaggcctctggtccagggagaaaccatggcagcaacttctgcttccgaatcatggtccctcccccaagactgaggttctccaggtagacatccatcgcctgcagagcctataagctctagaaggggatgccccaggagcagggcaaccccgtctgcgtttcccattaatttctctctggatgcctttgtgaagtctcttcttgctgtgattgtgattattgggattttttttttttctggctttggctgcattctccaatccccgccccgtgattcctcccagatcacaaagctccagccctccctgaggaccagagggtggcctggtgtgactcagatacctcttctcttaagtgtcatcacagatgtaattagcatgtgatttgcactggtccctgcctggttgggagtgaggacaagtggtaaacctgctgggaaacactggtttcagagtgtcatctgtccctccccccaaccccctccacgccagaacacacctaagatccctgagctacagaggcggggggggggggggggaaagggggtctgctgactagttccctttatatctgttttccaggcagaccctttcccatgatcctccatgcccaaacctgagcaggacccagtgggaagtagtgagacttattttatctgaaaagtcacatccctaaaacagcacttggtcttctgaaagcactggtgggatcaaaagcaactggcaaaccttgtcccccacccttagactatctgttgcctggctcatgcctcccatgatgccccgtccccctggcccattctctctggaacaatgtctttttcccatgctcccctccccgcccagttcattcacactgttcatctcacacatgacattgctgctccctttgggcagcctcagctcccaacatgggaaactgaagaaacagaacgaggtaggcaggtggcagttcagatgctggggctgctgaggaagggacgttgcaaactcaagtcacctaatactttggctctactttaatttgggattgggggttgtgatcgagacagggtttctctgggcagttcttgctgtcctggaatgcactctgtagaccagctggcctcgaacttcacaaagatccaccatccctgcctccccggtgctgggattaaagtcacatgccacaaccacccaactaaattaaactttttaaaaagggccagggatgccactgggctagagagactgcccagtgtgtgggaggccctgagttcagtccccaacattgcaggatgaatgagtcaataggaaaacagcacagcagataatacaaagataacttggagaaaaggaagctggggccagagttgtagctctcttggtaatatgcttgcctagcatgcaggaagccctgggttcgatccccagtgctgcagaaagcagctccagtagctaggagctgggatcaggaggagcaggaggagcaggaggagcaggagcagcagaaggagcaggagcagcaggaggagcaggaggagcaggaggagcaggagcagcaggaggagcaggaggagcaggagcagcaggaggagcaggaggagcaggagcagcaggaggagcaggagcagcaggaggagcaggaggagcaggagcagcaggaggagcaggaggagcaggaggagcaggagcaggaggaggagcaggaggagcaggaggaggagcaggaggaggagggggagcaggaggaggaggagcaggaggagcaggagcaggaggagcaggagcagcaggaggagcaggaggaggagcaggaggagcaggaggaggaggaggagcaggagcaggaggagcaggaggagcagtaggagcaggaggagcaggaggaacaggagcagcaggaggagcaggaggaggaggaggagcaggaggaggaggagcaggaggaggaggagcaggaggagcaggaggagcaggagcaggaggagcaggaggagcaggaggagcaggaggagcaggaggaggaggaggagcaggagaagaaggaggaggaggagcaggaggagcaggaggagcaggaggaggagcaggaggagcaggaggaggagcaggaggagcaggaggagcaggaggagcaggaggagcaggaggaggagcaggaggagcaggaggagnnnnnnnnnnnnnnnnnnnncagtaggagcagtagtagcagtagcagcagcaggagcagtaggagcagcagcagcagcagcaggagcagcaggagcagcaggagcaggaggagcagcaggagcagcaggagcaggaggagcaggaggagcaggaggaggaggaggagcaggaggaggaggagcaggaggagcaagaggagcaggaggaggagcaggaggagcagcaggaggagcaggagcaggaggaggaggagcaggagcaggaggagcaggaggaacaggagcagcaggaggagcaggaggaacaggagcagcaggaggagcaggaggagcaggaggagcaggagttcaaggccgccctctgttaggtaagaagttagcaattttggggccccactcagggggagggaggagtaattgtatgtgcaagtgtgtgtgtgtgtgtgtgtgtgtgtgtgtgtgtgttatgatgttagggtgctccagagaaagggggctcctctctgctctctgctaagatgtcattgaaagagagacctctgcagtgacaacatttcgtggaaggatattctaggcagaagaaagcctgaaggcatggctctgaggcaggagcatgcctctctgtcaaggaagaggatgtactcagtcccagcactggggaggcagagacaggaggtttctagagcttgctggctagccagcctggctgaattagtaaacttcaggttcagtgagggcttgtgtctcaaaacttgcagtggagagcagttgaggacacctggtgtggtcctctgtgtgtacgttcatgtgtacacacaaccacatctgtgtactcacatatgtcacatgtgcacacaggcgcatgcacacagaggtaaagatggcagcattaggggacaatcaggtatattcaagggtattgtcctgagagacactggctaccagatgatacagtctgtgtgactctgtgacatccccaaaaaacacaggagctctgtggctgacagcaggggttgcaaagacttagaacaaggcggggatctttattttttggggggtagggataggagaattgtttggggccctagcttagtggaggggagacaggaacctatacatgcattgttatttatagaacaaaaactgttataccacatgctaacttatgaagtattgcagatatccccatccccccaaaaatcacgaggtgagaggagtcaccatcaagtgtatctttagggctcgtagactaaatgacaccacccccttcctcaatgttttcaatcagcaatcctgtagtatgcatatgatagacaggcatctctggttcaagcttgatgggcaacccatagccaggtggggaaactgagtcagacaaaccagaacaaaaaagggacagaggtcgcaggactgaaccacacggaacaccaggatacgtgctgcactgggtcccaagggcacagactctgtgctcagaaatcagaggaggaggaggggggggggaagaaagaaggagggagagagggaaggtgaaagaggggagggagggaaggaaagagggagagagggnnnnnnnnnnnnnnnnnnnnttgtcggctcacccggaccaaaaaggggcaagggttgcaggacttaaccccccggaacccccggatacgtgttgcactgggtccccagggcacagactctgtgctcagaaatcaaaggaggaggagggggggggaaaaaaaaaggagggaaagagggaaggtgaaagaggggagggagggaaggaaagagggagagagggaaggagggagagaagaagggagggaggtgtgaggaagggaaggagggaagaggaaggaagataggagggagggaaggaaggatgccttaagacaacagactgaaggtcaggtgtagctagcctacgagagattcccacaatgcacttgaccatgggctacaaactgggaactgttcatttaaacacacctccattggcctctgtgtgagtactttatgactcccagaagagctgggccaggcagagggaggtgcgttcgtacaggtgaggagcacctgccacctcccacagcactacacccatctgggatgaaaatgacggctctctagtgttcttccctcaaagtgccagctgccagtcggattgaattagatttcacaggcttgtgctggggtttttttttttttttctcccaatacgtggaattcaccagcaaattactcttaaagagggaaaatcaatcatttggagcggagataagctgaaggcgaggcagcctgggattgatcccatctgtgcaggcgtgtgtggaattcgatgggtaacctggggcaccaaggagaagagaggagagatgaaaggagagagaggctcttagcctgtctgggccagagtaaccagggggctcacatgtctccttgtgaagacagggcagtctaagaccaatgagctggaggatttggttgcatggcaagagacacttcgtggtttttagatggtcatcttctccctgtatccacacatagcagaaagggtaaagttggacctggggttcctttcatatgtgccatcaggagctggcatcctgatcaggaagattccacccacccacccaaaccacctcccaaaagcctgccctcctttgagattagggttttgatatgggcatgggcgtggagtggggagtgaccctgagtgtctatggtttcagacaggaagtgaagggacaggaaggggaacagagagtgggagaggacacgagagagacagagggtgggaggaaacgcttcagtcagaggacatcaagtaattcatgtttgtgggtgcataggagaaacccccaaagcaaaagtaccattttacagactgggaaactgaggcacgggaaaagatcttcccctaccacacagcgatgggtggtagctccagaaaatacatactctcagctttaggtttgtctgcttggaggcccaaacctgagaaggcaggacttggggtgagaggagacccagaaagagggcagtagccttggctctgtggggagaaaggggaccctctgaactgttgggggccagacagacctagaactcaggaaagggcagtgagacccaactgctgaccatgggagacatttgtccccatggtccccaaggggagctggagacagagtcggcgagctcccctgggttctggtgctttctgtacttggtcatccagacgagccttgggggtgcagagggtgtttggcccagggcagcagggacagaagtctagggtgggagggagaagcggctgactctaagggagagggggagggggtctcctccctgccaaggccacttcaccaagtctgattgggattaattaagcggaagatgggacaaaggagtgataaagaacacagcttgtcagctttgattttctgccactcaatagcatggatgagctcaacaaacagcaagaggacggagcccggcagtccatgctgagggtgggagtggatggatggtccctgcatcctacacatccattgtgggtccccctctgcctgcccctctctgccctggccaaggtctcaactctgcccacctcccgagtccctcccctctcaccccatgcctcctagaactctgaaaatggctttcctagatgagcgtctgtccaggcagctaccaggatgtcacagtttgtcctcagtagtctgctgggtggacagcacttctccccccaccaaccccattttgcagacaaggaaagcaggtctaatgggggaaaaatcatttgcgtgaaactgcagatctaacgagggagatgcctcgggtctgactgctcagcgcatctaaatttcgtctgtggtgtatgcatgcgcaaaggcatatatgtggaagtcagaggtttcccttgggggctttctttccaccttattgtttgagacagactcgctcattacttgtagctcatgaattctgactgaccagcaaaccccagaaatctttctgccccttcccctgcctctagtactgccattacaggagcactctgcacctgctgtttctataggtgctgggaatcgaacccaggacctcaggcttgcaaagcaagtactttattccttcagccatctccctagccctaatgttaacaaacatcactaaacttcagtgttccccactaggtgtgtggtcacagactctcctgtggtagatctgagttctagacagcatttctaaagggcatggcactgactctggggaccctctctgtaccccacttccttatcccaggcctcagcataggctaaagggctctcaccagcccatggagctcccagaagcctctgggaagaaggctcagttcaggtcagagagggcaggctctaccgcacttcctttagagatggagatggaaatgtgcagacagagggtagaacctggcaaggatgtttaggggttggagccctgaaaactatgagttttattatcatccttggtgttttattatgctcttggtgtttaggccagggatggtagaaggggactttgaatatttatctcctactcaaatactcctggctggaggcttattcgtgagggtgtaaccaaagcttgaatttagacactaaatattttaaaatagtttcagaattgaatctctagatttttatggtcaaagtaggctataaccattccctaagtttttagggttacatctttaaaagagggagcattatagtcgtctgagttggggttctgttgaggtccataaagagaaagccacatcctataacagagaagccaagattccaaggaaagtgagccaccaggtcattggcctggcgctgccagagaccaacagcagagagcaaagagtctactgtgttaccatagtaacgcatctgtgcttgggctaggggactggtctgcaggtctcaggccctggaggaggcctgggcatcagtagggggatgcatggagaccttcttcactctgggaacctgggtaactgtggagggatggaggatgttcaacagacctcagttcatagccacaaagcattgctggagaagaagtcaggccaacattcccccacccaacgcaggtcccttgtccctgtctggtgagagcctcaagaaccagcatttgctgagggcccagtgctgggccccaccccatgaaaaactgaggcgagcacttgtccaggagaccactgtgacacagcactggacccagttccacaggcttagtggcaaggggcaagggcagggcctgctctgaccacacctggtggccctccccttccaaaaactgggagtgggggtaaggtgaagggaggtggcccaacagtctctgctggcagctggctgataaggaactgcgctctgcagggggccagaaggctgtagtcaccaggagtgattggggaaaggcagcagcggggagccaggaatgatttcagtgtgtaacccttcctaagagatacataaaaccaagcctgggagaggtctccagccagcagcccctggctgccaggccttgggagcaggctgcagctcgtcttagggaccacagccccaccaatcagcccttctgatcacctcacgcagagtagaatttaatcccccgccctgcaggctcttctccatacacactaggctcccttttgatgttctttttatcttcctttctaaccaagtcgccctttagcagctctgaaagtgcctcctgtcacctccagcagccggatggcagctctaataaagggacaagtgagaatgggagggtcctggtgactcaacaggtagggactgacaccctttctttatcaccggtggcgtgggaagtggagggggaaactaaaacttaaaaagacaggacagaccagaattcgaatccttccctgatgggtgtgtatattgaatagctgtcctctctgtctcttgtagagggcctggacaaatgttgatgtcacacaggtgtgtgtcacacatgttgaggcctaaagttggaagctattgagacaaaaaggctccctggccagggttgtagttaaaagagttttgcaccaagtcaacaaaacaaggtgggtttctctcacacacgcccatcccccgcagatgagttcctgcttgggtctggcaggaactggccttctagaatggacagggagagcatgcggaatgggttagtagtgattcccaggtggtctgagaagcttcagagtcctgacaagtatgggctcaggcctgagcccctggggggtggtagatccaggagaggagatcgggagtggacagaccttcgtatctgagacccacagaagtcttgtcaagaggccggagaaggggttgggaagctggtgggttaaaaaagcgcctgccacatatgcacagggacttgagtttgatctccagctcccaccaaaaagccaggtttggtagcccaggattaaagtcctagtactgggaaggtagaggcagtaccctgggactccctggccggccagcctcaccaagctggccacatgggcgagccactggatctcccagcaagactgcatcagatcacaaggtagacctgaggcacccggggatgaaccctgagatggatatctgacctctacacccatgcgcgcaaacagtcacaggcacacatgtacctacacaagaatactcccaaagacgtgtcagctagggagctaccctgagggtttacacaaacgctgtgctgtgtggagctcatgatgttcctccaagaggctcttcagttcccgtggttgacctcagcaactgggcaccccatctctctctttgtgcttcctgcaacctcccctgttgttctgtcccatccgccagatcattctagttaaggctcaaacttgctcatgccttggttgctggttccccgtggctctcacatgttggcacacattgagatacctggagaactgttacaatgcagtgctgggacccactccagagtctccggtttaattgacctaggagtaaatggtccacaaatgtgctttctagcctgctccaaaggaatgggaatagcgatgctgtggagtaccaggaccagactctgagaaagcctctcctggactgatcctgaatgttcaccaccctgtcccatagcccagacgcctagaaggaataaaaagggggactggggattcggctcagttggcagtgggccaggcttgcctggcatgaagccctgggttaagtccccagctctgaataaactaggcatggtggcatgcacccgtaatcccagaattgaggaggtagaagctgggggatccagaatttaaggttatcctcagctacatagcaagatgaataccagcctgagatacaggagaccctgattcaaggtcatggggtgggataaaggacaaacacagctgtctgggacattctctctctccttcttggctggcaaggcatgagtgactgtattccccaaaccctccctgctctgctggactgaaggttctcagactgagaggcctagaaaagtgtgcctctctcaagtcacttctgtcaggcattctgtcatagcaaccagaagcctgtcacctctggtgacgatattgcttaccaagggaccaacatgctccttacctgctgcatcctgccactgcggtggggaaaacctatgtcagaaccctgctcctttgccctgtggggcagggtgcactgacctggaacctgggcctgggctctttaccaactgccaccttccagccatcctgagtagctccaacctctctgaggggtcttcacctccaccctgcccgctccctcaggaagaagggtgtgagggagaactgcggccttgccttcatatacctaggatgtatgcaaggctcccagcatgacaaatgaccagagagactgatgatgcaatgggggatgctcagcagcctctaagagaactgaggaagggctgggacaagggttctactagtaaggtgcccgttgagcaaacacgaagaattgagttcaaatcctcagactctatatgcaaagaaagctaggcatggtggcttgtgcttgtaacctcagcactgggtcaggagagggagggagacaggtggatccctgaggccagccaggctagcccaggtgataaatctcaggatcagtgaatggtcccatctcaaaaataaagatggagtgcaatcggggaaagacatctgtggttgacctctgctctctacacatatgtgcacatgtgcaattgtgtgtgtatgcgtgcacactcccatatacatacacctacactagcaaacgcctataccatacagcacaacacaaacagaaacacactagaggcaaataatcttcagacttctcaaaggctggaaaccacaccagcaggggggtgctcaaagctgtctgtggccatccctgtcagcagcggcacctgggcatgggtccccataatggaactataagaggaggaagagtatgcttctgtttgtatctcatggaggtattggtgtctgtgcacaaagaagtctatcccttggtgtgggcctcttggggcaaggacctgggaacaaggtgaggggccacctctggggagaaacatgaaacagttggaacagttcctaagtttctggctttcttcttcttcttcttcttcttcttcttcttcttcttcttcttcttcttcttcttcttcttcttcttcttcttcttcttcttnnnnnnnnnnnnnnnnnnnnaaagtggaaggatgagagagagatagtgggacgcaggtttcagtaagcgtgtaaaagacaggcaagtgacgaaaggtgataaagatccgaaggggtcatagaggtagcacatcattgtgcagagtgaagaagaaggacagatggaaatagtcacaccactctgcctcccatatgttaggaatgtgcctggaaaggagcagagatgttaatggggaagtatcgcaggaagctagcagataataggagcaggaccccagtctccgtgtccagcactctccttctcctccccctcctcttctgccccctcctcttcttccttcttttcctcctctttgaacactcttttttctttctctacttcctcttctcctccttcttcttgtccttctccccttcttccttctccccttcctccttttcctcctccttcttctacttcttcattttctgaatgtgaggaaaataaaaggatagcagtggtgagtgctgatttctgcagggtttctctccaggattctggaagcagaatgtggggccatggccccttacctcacagctcactctagggacacatgggctgcaggagggcacagaaaagaagatgcatgacctcctatgacctcaccttccctacctcaccgcagctcgtgatccaccctctttcctctcccctccagcacccctgtcttagctgtggactcagacctgagggttctgtctctgtaccatagactaggatcccagggtcccttttagcctctgtcctttaccctggctcgtgattcactgccttctctctctgtttccttctttcctccctgtgtggctctctctggctcctccttgtccctgcctctttgactgatgggttccatggacagaacttggtaagtgaggcttggcaagggcagggaggcctgggggtggggtgggaacatcacagagagccttcctctgcccgagcaggcccagtccagacactcccagctcctcaggcctatgagtgctgtggtcaagaggccagggttcacaggagacagccattggtgtttagaactgtcacactccattgcctttgctattagtgtcctttcgggcatttaattggtcccctccggctgatgggatggatcctactagagagaccttaaaattctgcaacccaagaggctcagaatagcactgtctgtatgatagtctccaggaagctgttctggactgggggctctggagtgccctcccaaccttccttgaccccagaataggctgaaaggggctcacagtgcttggcctatcactgggctccagggtgctccagggaatccagcttctgggactagagatgcctagtggtcccctcttgccatgaagatctagcagaagggagttccccaaaatctcgagttcatgataatgctgtagccctatgttcaaccacaagaggcctgtctattcgggtggagcatcagatggatggcttacatcggagccagaaactcatctcaggttgatgatcactaaacatttatagccaaggacagacagacacacatgacaggggtacacaccccatggagaggagttccccatgcagcaggaaaggccagactccttcagcaagcccaaatatccacttcacttcagccttggctccacccactgagctgagctgagatcacgtggccctgagccctgcctctacttccatgagcctcgttgtcttgtaagtgtaattccctacaggaaaactgagctgggtaaaatattgcaatagaagaaaagtctgcacactgaaccccaaatcaacagaatagagcggctgatgcagcagccctagtgcgggtctctggggtgcaaggcacactgtagggttctttgtcccctagattcctcggtcaccctcccacctccgtgtcatgcatagcagcccaccacactccttaacatattttccctgtcctcttcagtcccagcccaccatagacacctcattttttttctttctctacttttcatttctcacctctcccttcatctcccttgggcctgtttatttgtttgtttgtttgtttgtttgtttgtttgtttgtttgagacagggtttctctgtgtagccctggctgtcctggaactcactctgtagaccaggctggcctcgaactcagaaatccacctgcctctgcctcccaagtgctgggattaaaggcgtgtgccaccactgcccggctctggagtcttttattgattgatctttaattttacattttacttgtttagtcagtgatagagaggcctgcttgtgtcacgacatgcacgtggaagtcagaggacagcatgtaggaatcatttgtcttctaccatgtgggtcgtggggattgaactcatgtctttgggcttggtggcaaacccatttactgtctgagcattgagccatttcttcagcactgcctgcaggttctaatcctggcagattcctctccctctttacatcccttagtgtagaaaggatcaggaagtggagaatgaaccaggagagagacacttagtatatgacagacaagaatgacagaaagtgaccagaggatggtccttgggccttagagatggagactgtggggctggctagcaggcagaaagaccttcctgagcacgtgcatcctccgctgccccacagtggagtcgctgacgtcaccctccagcatcctctactgctccagtctggctccaccccctgcaccctttgcaactggcttcttcactctcacgcagggtctgaacagcatgttcgaggtgtacctggtgggcaacaactcccaccacttcatcatctccccaacctccgtccaagggaaagcggacatccgcatccgagtggcaatcccgctggactatgagactgtggacagatacgactttgacgtaagcctccatcagcatctcctcgggccacctggggaggttgaagggaaggctgaggaggatggagtagcacccctaagtcctacctccccactctccgcatttccctagggatctgtcccagagaaaccacagagatggcaggggctaaatcctcaaggagggcaagtatttacaaaaccacagacccttctctggtatccctgcagcccatcctggccagcacagtccagctcccaggaccactccctcccttgagaaggccctgtgagggggctcatagaacacaactggcatcagccttgactctagcagatgcttgtggttagaaccagccacggcactgagaggtctccagagatacgtgggagctcacgcaactttgctccgctcctccagctctttgccaacgagagtgtacccgaccacgtgggctatgccaaggtgaagattacgctcatcaatgaaaatgacaaccggcccatcttcagccagcccctctacaatgtcagcctgtatgagaacatcacggtggggacctccgtgctgacagtcctggtaagtccccaggtccacaggggccataagctcttagatatcctcggggacactgagcatctgggtatcaggtgccgtaagtgcccggaatctgttggttggtaatgatagtattcagactcttcttgaaaccgagaaaatggaccagcctgtggaacaataagagggagaaggatacttcagttttctttattttccctgaaaggcatgcatccaagatggcccaggagacctagaaaccccatgtgatgatcaatggactgggtgttagccatctctgaagggaatgaccctccctgtctctgaggacagcaggctccttgaagctgcccaagaagcccttgatacctttggcctttgacaagcccccatcctcacctgaggttactgtgtgtatgtcagtcaaggctcttgactacaagaggcaggatgtaacttgatattataagtgagttcaggcatggctgtatctgggcgttcatataaagaatactctgtcattagcagccagtttagcttttttgcagtgactgagatggtcataatacctccagattttcttagcagcttatcaatgctagtggaggaaaatatatatatatatatatattggtagccccaaccaatgccctagaactgatctcagcatcttcgtcctgccaccaactgtcacaattaatacatgccagctatgggtcacactttccatactagacctaagccttaggtgttgattctgttcagattctatgggctgacaatacaaaaggagtatccattataaatttgaataggccactgagcagatcaatatggtagatgctgctatataagcccagggtccgacccatcacaggcagtcaataaatgttaggttaccacatccctctctctccctgtgcatgagaggcccacagaggccttgctgccatgtcttgctccaagctgctgttgcctaccatagcaggcccccaccctgaagtgtgtttactctgtaaacagatggtctggagcaacattgtacccccaggcctttccatctgacagttattaatatttcaaacagatgtttagctagtcgggccgtcagatggaaaccatgagcctgctgtggcttttctccgaagccactgctcccagcccacggctcccccagtttctaccgcagtgcctgagcaatatatcacccatcgccctgggctcccggaccctcctctagcctcccaggcccaacccaacaagatgtacgaaaggctccagcatcctgggctcaaagggagcgtgtgtctcccacacaccatggaatatcaacgggacgggtgccaaacagtctgtgataaaaccaggcaggggacagtggccatgtccctaggtcaaggatcatgtgacaaggaatttgcgtgtgtgatccaggctgggtggtatcaggacactcattcctggagtccttgctgggagcagaattctgtttgtattggacattcttgtagatgagcagttctcagcctgcctaatgctgccaccctttaatacagttcctagcattgtggtgcccccccccaccttgaaattactctgttgctactttctaactacttttgctaatattataaatcctagtgtaaacatctgatatgaaggatctctgatctatgacccctgtgaaggggtcatttgacctccaagggggtcttgacccacaggttgagaaccagtgctgtagctggcggaccagcttggaatactgtagggctgagattgaagcatgagccgaagagtctatcagtctctggcgaacatgagttaagcccttcaggctaactgttcccagaacatcaacagtcctgagcttgctacagaccgacctaacctcatctctagttctgttccctctcctccctgcctttcttggggctgctgatggtgtctgcacgtggctgtccaatatggccagctgctgccttcacgcttccccatcccagccccaccaccccgacgccaggactgtggaaccatgaagctgtggggctcttagacatggtgctaagccatggacctcagtctcagacctttgctgagggcggctctgtccctgtccctctaagcttgcgttcatgtcctccctaaatttatctgcataatgggcatgaccgacacccaaagctgtggaaacagaggttacaaatgcagccacgggtgtctcccacaactgtcaactctctgtcaccccaaggtgctgcccagctctgggcaggtggcaggttccctgaccacagcccgacctccatccttacattctagccccacccatagccttctggccttctggccatcttggccatgccccctctagatctaagtccccacttccctttgtgcagctcagaaggggccaccattacagctgcctgctcagagaccgtaaaattccttctccctgaccttttccacggtgttattaaaatgtttcatgggcagttgtgtcaggaaaaaattataaagaaaaaggaagatgttttaatttgcaccacaggctgagcagagactgcagccaggggcttgcccagccccccaccctgccacctgtgcaggggaagccatggcatgacagtagccagggaagctagctgtcgccaccggtctggggatcctatatggacctatggagccgggtctcttatttctctgctggctgggattttggagcccagggctctccaaggaccctgaggtcagagtatgaccttgagcccagttctggatgcttgcttgggtcatcactcaggaatgtcccttcccccgtgctaaccccccccccccagcacatcacctgtgaaacaatgaaggtatgttgcatgtgcttggctggagctgccgccagacctagtgcctggagcacttgtgctggggacagggggtgatggggatgcctgggacagcctctgaggaccaagtcctgtgtcctttggtctcttactgcctcagtagcagtcctcctgccccggccacataactgcagcctcactgtaaccaacacataatatggccattgattcctacctgctaagtccgtcattgtccttttccagatgaggaaactaaggtgggggtgggtggggaagtggcttgctcagagccccagacctactaagtggcctcagatcttgaacaaagacccacagagggactgtgctggacctctgatccctttcagtcacattcagagccgaggacagagaggagccaaggaggacactgcagatccctgagaacagtctataggctcaccccaggcagaccctcagtaccatcaggtaccatcaggagaatttctacctgtggagccagagcagagacagttgggaaggcatgggactgtgtccagggaaacaggaatctcagagtggctgaaaccgtctgtataaggaaatctcctgggatggtaggagactcctgggatgggggatggcagggtctcagaagggcctggtagggtttgtgggaaagaagaggtttagggtgaatgtagccactcattcattctacagatctctgttgaccgctggctacatgctaggcacatggccctgtggtcagtgtatggggtgttgggagttcaccctgccctggaagaacctgcactgggaaacgagtgtttgtgttcagtattactctctgtgacggagaccagatcagcattagaaatggatgctgggcacctgaccttcattagggtcaagaaattcttctctgagaaagtgacactaaagtagacattagcagataactgaggaaaggggaggacatcccggagagggagaatggcatgtgcaaagggcctgtggtgaggggagtggtatgcagggggctggagtcctgtttcttcgaggccagagccctcaaatgtctctcttcttgcaaattgacatttactccaggatgcccactggactgatgttcaggtagtgtggtcacatagctttcatgcccttgcaggttccctgtgggaggcgtttgactgactaggagagtcattataaccctgtgcagagcagagtaccacctcccagctatgggaagacaggcctcaaggaggcaaaggcaggctcctatcccactccttcttccagtacacccagatgagtttactgtgatctttgtccctaagtcacccaggaggacctagactttctggtcacaggccactttctctgggactctgctgcctttcctacactgtgagaatgaggtgccatcttggccaccagggtggtgccagagtgtgaatggtacaaagtggacacatagcgtcttctattatggttgggttatctgctaccctgagagccttaggtctaccatggcagacttggtagtgataagccatgagacctcaacttcttcctctgagtcctggggatgtttcctgctgaggagggcggttgtaaaggggagtggagaggttcagccgactctcagctcacacttaagagcagagtcttcccacagcacctagtgagctaggtgcttcccttgacatcctggtcctgccccagcaatgcagtcactgagcctctggtccccagtgacatgcaaggaagggtttctgttccatttcactcagccccagaggcaggggtagcatcctggctggctagtctcactcccagctctaaggtgcacctcccaccctaccaaagcccatccctcccactggctctggggcctctcatctgccctgctcctctctctccagcctctggtctggaagcttggaaaagaagcccatggttggtggcctagacttcctgaggccagaactaagcacattctccccgatcaagctggcctttccacgctgtctgtcaacacagagtgcctatgctctttgtctcctctgcctcctcttcacaaatactcaaggaaagtgatatcactgccccaggctggccttgctggaggccaacttcaatcctgtatagtcaggctctgagagctgacttccaatacagcagggtctctcctatcagctgcaaggcctggcttccagctctgtgactgccagcacccatgcctgccccagcccaccccttctgttgagcccaagcaattgaacttagagcccagatacagaatctagggaggccatcccttgcctctacatcagatggtgctccctaaaactcaccctaggtcctccccatccctctgttcccaggaggaggacacattgccccatagcttccgtggggggccttctagaactacaacagctactgcaggaggatgctggcttagaacaaggctctgaaaccagagtactaggtttctgtccaagctttgctgatggctgagcctgaccccaagtaggtgcttagctgtgtcctggtcccccagactccataatgtactgtgggggtgatgaacgaaaactcatcttatagttaagagacagaacagggctggagagatggctcagtgcttaagagcactggctgctcttccagaggacctgagttcaattcccagcacccacatggtggctcacaaccatctgtgactccagttcaaggggatccaacatcctttggtggcctccatggggactcagtgcataggcatacatgcaggaaaacacccctacacataaaaataagtaattttaaacatgagacagaacagctcgtacctggagtgccttgggtgggtgacagctatgattgtccaagcagcttgaaagcactggctgccacgctttgggtctccggagctctacctgcccctccttccactctggctccccaggctccaggctccctatgcacactgagccttgccaatgtaggcacaggagcccaacacccggcctcaaggcgccaaacacagatgaggctagcagagccggggggacaggacaagattctgggaagaggcagagagagggtgctatagggtttggggcttgtgcagttgctcgcgaacccagacttctaaggcccctgtactgccttaacctagaattctccctgctgttagaacgggcccctcagctcctgctgcgcagaccctgcttatcaaggagtttgccttttgtacgggagttgtctgattcccttccctcttagaaaactcaggaggaggctggagagatggcttagtggttaagagcactgactgcacttccagaggtcctgagttcaattcccagcaaccacatggtggctcacaaccatctgtaatgagatctggtgccctcttctggcctgcaggtgaacatgcaggcagagcgctgtatacataatgaataaatctaaggaaggaaggaaggaaggaaggaaggaaggaaggaaggaaggaaggaaggaaggaaggaaggaaaaaggaaagaaaagaaactcagacgctctccacagctcttgcccactcctgcacctgtcagcccaccatcagctaacactcacttcctgcctgctctgcacacgggctagtgcctctgttcacacgcagcttgtctctgttctgattgggtgatagaagtcaccaccatatcacccaaacacagccgccaccatatcattatacttgtggattctgtaatcagagatacagaaattctccagggctggcagggcctggagggttcaccttcataggaccctcctggagaaacaggagcctagtccaggggttctctacctgtaggtcacaacccctttgggggttgaatgaccttgtcagagagttctcctaagactgtccgcatatcagataattactttatgatttatgattcatgacagtagcaaaatcacaattatgaagtagcaatgaaaataatttcatggttgggggtcaccctaatatggggcactgtgtcaaagggtctcaatgtcaataagaggcattaggaaggtagagaacccctgccctcgacacttgctggctactgagtttaagcactctggacctgggttggcattcagtgcctcagcaaaccaggtcctgacacctgctgtcctgcatcccagaccctccatcctccctcacatcctcagcctttcctgtcctagtatctgctgtgcctcccctcaatttattgatcctcttgactgtaagagccagcccactgtgcccacctccaacaggaagccctccagcacgcacccatctctcctccgtgctccctccccctcccctgctccctgaccggcttcttctcagggatcttcaacatagctttgaatcctgtgtaagggggcgggggatcaaaggaaacttgctgggggcgtgtggcaggagactgagtggacaaaggcctcctggggaaactgaggcacagcgacagtaaacagtgttaccctaagttactcagtcagtccacggaatttctttttcaagtgtgagtgcttttctgtgctggataccccattagtcaggtactgagattatgtgtgtgaccctaggccattcttgtcccctgtctagacttggcttccagttcagcccccaaaagagagtcacccagacatcttctgaggattcccctcaggaaagggagggcttcaaagagacagggtgaagggggacagaggtggaggagggcagggtagaaggtgagctattagctacaggagagcaaggtgagaattgagggtgacctttctgctgcctggatggggagcgggtcaccttttgctctgcataatccactcccccagctcacctgggacctgggctttacctgtcaatcatacccaccttggtgccgccctcccttaactgaccaggtaccttcatggagaaaggggcctatagaacctacagacagggcagcaatcacgcctcccttctcccggcaggctcctggggcaggctgctgtctccctgggttctggactcatgctctgtgccctgagaaaccagggtttctactttaacagtatgagggggtctcctcagggtcacagtccagggcctacaaagagcaagtgtccaccagccatcccaggctttcgagaacagctcggctccctgcttctgatggctttcatttgactcgattctaccatggcatacagctgccagcagaactcacagcgtgaattattagtcagggagtctgcttgctcagcccaatgggtaggccccatctggatagtttaccaaatcccacaaaagacaggggtcatccttgggaagacagcacttctatggtaacttagaatcccccccaccccctcctcagccgcccttcccatgggccgatctgattccccattccccaccccaccccctcccgccaacctttaccactggcatcttaattgacctccttgttctggaagccctagagacctgagactccagctgtgcttaaacagaacaaaatctcttccaatttccccaccgtttaaaagaaaattgaattctttatctgcagcctggggagggggaggagggggggagaggaggagggaaggaggaaaaaaaaaaaacccaggaaatagcaggtcactggcccagctcccaagctggcctagaagctttcgtggacactctggtccctccatttgaagggtacctaaggctgtccccaaaggggacccctttggtgggctcttggttcatgtcctgttggagtttgtgcgttggaatatgtgtggtggggggaggggccaggctgctgaaggtgattgacaggttcctctagctgtcaggcttcagtgcttcctgccactgtttatctccttcatctaaatatcaatcctaaaaccaaaataggatggggttccgtggtaggacccagagttctgagtggggtggggctgggcttgcaggtgaggaggaagtgaagaaggaggccactgagacttccagtttctgggctgagttagggtataaagccagggtcccccacctctacccctgaagtgcaccagcctggctgatgatggttctcagagaatcagcctttcagtgtatctatttttaccaaactgacctattgctgccaggctctgcagagctgcgtgcgcagcttctgtcacaggtgtccccagaacctaccagcctcaggagctgctggccaccaatctctgccccagtgattattcattttatgtatgtgagtacactgtagctgtcatcagacacaccagaagagggcatcagatcccattacagatggttgtgagctaccatgtggttgctgggaattgaactcaggacctctggaagagcagtcagtgctcttaactgctgagccatcttctccagctcctctgccccaaagtaaaaggcaaaagatactcagtagcatcccgggtgatggatcccaggagttgagtgactcttgggcacttcatgttttctataactatggttcaaacgacacaggtccagggaagctggtatagctcaccagggcagctgagccatggctctgattccacctgtgttgaccccaagccctgcaccccgcttcctattcagtgttgttgtagttgcttgagttctgtaaaagtaggaccacccacgggtgaccttgagcgagtacctcaccagggaccttggtgtccttttctggaaaacagaaggacttggcggagtgctctctaaacctcccacactggcctggaatcacctgtccccagacggtcccctcctacacctagactttcaatccggaagtcacccttccgtaggctggccgatgatggttcttgctcaggccaattgtactaagaacaccggagcaaagaaaatggatcctgtgggcaaagggacagaggatggctgtaaaatcggccaggagtggagcaagttcataaacaatcacaaaccaaaggcctgtgcgaaggggccctgggctggagctgggaaggttcccagtctggggggaggtgactggagtcccgggcaaggagagcaaccggggcctcagatgaatccgtctatacagcagcaggaaggacggcttggggtaaactaagaggtgcgcggggtgtgtttgggagatgtggagctggggtggggctcagagttgactgacccagctgtgtaactatgggaggcgtggaagccatacttcctgcaagctcacctccccagtggctcaaagtccttctggtgctgacttacctagtgattgtcagactttggtatgttttgttttgttttgttttgttttgttttgttttgttttgttttgttttgttttgttttgttttagaggcaggatctcactgtataaccctggctggcctagaactcactatgtagaccaggctggcttgaatttataatctgtctgcctctgcctcccgttggctgggttgaaaagcacatgccccacagggtcatttaatttcctgatcctgggacatgccccagtatttttctattctatgctactacacataatttttaaaaaatgtacttgtgacccattagaatctaggagccaccttttttttttttttttttttttttttttgcttccctgggcctcattggatgaggaagaattgggggaggggtagacattaaatccaggagtgtccaatctacagcctgtgcgttgcaaaagcatgcatatgcttctgttacatgagattagattacaacaaggcattttcatctatgaaatttgtgcctgtgaaacacataatcaaattacagagggaaaaattacacacacacacacacacacacacacacacacacacacacacacctctaaaggggccacaagatggctgtcaccttgtataacagatccaaagtagatctctgtttaccctcctcactggcttcccagcagaactcagaatcagagcttcagcctgccagccatcttcccaccagccgagagcccagactggacagaagtcttctgtgagctcccactgtgtgtgctaagtctttacaacctacaattggaagattctagtcttggactggctgaatgatgaggaacattttgctccgtaagcctcaatccccctctctcagcatctgcaaaatgaggatgctgttggctcttctgtcttctaggctgggtttagaagactggacgcctccagtcttttaggctgttctgacagctaggtgggaaggaggtggggcaggggaagagaatgggaagccaaaaggtcatgagtctgaggcagaactgtttcttggcccctaacaggtacaagatgctaatcccccaaaaaccctgggttaaaaacccagaagagtaaaggacctggagatacagatctctgctgagctcagatctggggtgatacattctcccagccatgaactctgaccttaatttttcatgtcatgtgggactgtaaaatcggttagggctcggcaggtggagtgatggagatgtcaggcaggcaattgggtgggcatttaatctatcagatatgaggctcgccattcagtgagccaacaagagaatgtagaatcaatatgttcattagcgacaacatgtgttgacccaatcagcacccaccaatgacagcaggcacggcgcatgtcacccatgcgtcaaatcaccttggagagaggacatggccctgatgatcagtctccttccccccaacatcccggtacccctctgtagcttcccacttgtctaaaaagctgcctgtcacctggatggcccacagaggtgggggcagggggtggatgcttcagtgaggggacccggtgagctggctgtagccctgggtaggcggctcctccagggggttgattggactgtcttttctcttccatcccatctcctgggcccatgctggccctcttaactaagcctcagacgtgtgtctgtccccacacctctcctttccgcgtaatcccagcttgataatggccagagagaggtccaagtctttctgattgcagatgtctgtctcgcactgcccagccagcccccctcccatgtccccaggaaagtggcttttctgtgtccagtttgctttgcttggtgatcagatatgattgagaaaaaaaaaaagtcactcaatcgtatttttttcaaacctaagggcatgagagaacagagtctgtgaaaggcctaaaaaagggctttcctcctcctcttcttcctcctcttcctcttcctcctcctcttcctcttcctcctcctcatcttctccctcatcttcctgcttttcctcctctactttctctttctcctcctcttcttcccctcttcctcctcttcttccttttctttctcctcctcttcctcatcttttaaaaaacatttatttattttatgtataggagtatactgtagctgtacagatggttgtgagccatcatgtggttgctgggaattgaatttaggacctctgcttgctcagttcaaccccacttgctctggtcggcccctctcactcagtccctgcacactccagcccaaagattaataatttatttattatatgtaaatacacagtagctgtcttcagacacaccagaagagggcatcagatcccattacggatggttgtgagccaccatgtggttgctgggatttgaactcgggaccttcagaggagcagtcagtgctcttaaccactgagccatctctccagcccttctcctcatctttttttcctccttctttgccatgtgtatgtgaaagccagacaagtcagggctcagctctgtctggttgttgatggtcgaatgctgagccacctgtagctgtgggtcctgagaaaatagcaggcatgttgctgaatccccaaccagcctaaggccagcctccctcagaagccatggaaaacaacggtggtgggcaggcaggcagcatgctgggagtggcacccactagagccttgggcagatgacacaacccagctaggagatttgagtatggatgccaagtcccaccccagttcaggccaggagatgagagcgtagatccatagaaagtgagagtagcttccgaaaaggtgactgcccctgtctcttggataaagtggtacccggggcccagagtcattattagtagctctttggcttctgatgccatcaagcacttaggagatgcctcatggacacgtgggaagggccccagtgtactctggaaagggtccatgagtgttcgtcttggatgctatactcctgacccagatactcagtgtgcgtgctggttccagaccctgtgatacgatacacaggagggtgtcctggcgctgctccttagcaagactgctaccccctgtctagtctaggggcatggaggtgcattgagaggtcctgagtcacaatgggaactgggtcttgtctcagggagttcgtatttggtgttgggttcctagggggcctatctggcccactggctccacctgggtggctctggagcccaactctgttgccgaattgttgcaacgtcacttgtggccttcagtaggcagatctcaggaagtagctcctgtcaaagcataggaatagcaggacaagccttcctgagggctcctgggaggagattcttctaggctctagagtcaggcaattgtaacctctgcctctgtctgcgtaggtccttcttgccccttccaagtgtaccttgccaagacgattgtcataggatttaaagcccagccgatcatccactatgacctcatccttagcttatttacatccaccaaagccggttggttttccaaggccacatacctgtggggtgaggatgtggacatgtctgaaggggtgatggtttgacaaattccatcaccctcaaatgtgacttacagataacaaaagagacactcctactgggaacatggggtcaggtcatgtgatctagaagtttttcatatcttcttcccaggccctagcgccccctctatcccccccccccccccgtccatctcaccccagccccaccttgcaccatctgtcccaagaccatgacctcttcagctaggccccctcgacccacctggaatgctcccaggggccactccttccctcctgctgggcctcctctcaccattctttgccatgccataacctccagccacagtgggtccattctcttgcctgtgtggggactgtacagccactggtagtagatgcatggtgaagagatcctcctcagcatccttgcttgtcctgtgtggttggtgaccgtgcaggttcatgctaaaccttgacggggaaggctgacttgcaagcccagcaaggccagaaccatagacatcccagacagggctagaaaaatccccttcctgatacaggaacttgggcacaagacaggaagtggcttctctgaatctctggccagttggagacaggatctctagcagactcgagttcaaattctgactgatactgtggcccactaactttaataagtcacttcatctccctgggccttaatgcctcgcctagaagacagatgtgataatgaggagaaaatggcaaacagactcacttgagcgtgcctaacacataaacaagcagccgtctattgccttaaagctgtaatcaccaagactgtcttaaaaaggaggtaggcttgggaaatgtcacttgctttgcagatgtgagggcctaagttggaatcccttgaacccgcacagaaaaggtgggaaatgctcccgaaaaacaagactcaaggttgccctccatcctcatgcatgcacacatgagcacatacgtgcgcatacatgcacacatgtgtaccgaacacaaaaagagatgaggcagcagagtatttttgttactgcccaggctgctacctcttgtaatgtacttggtaaacctattacctttcttaaacacacacacatacacacactcacgaaaatgaaatttcttatacaagcccagtgctgtgtgacttcaacaccttgcttaacctctctgagccttgcttgcttcacccataaagtggggaccatgttaggggtagagtcaaaatgtcggcacatccatgcctctcataacagtgctggaccgctaaggaactgagcaggaggggaaggacgttctggcagccatcagcagacacaattctgtctgttggcttccagctgacagccaccagaagaggttttcaccccagaccccttacctcactgcttctcataaaggttgatgtcaagttgttaaagacagtgtcttccatggcgccaggcccacatacttagctatccctctgcctcggagacccccaccaccactgaactagagtccctggggactacccaggcagttggtatgctttgcccctgttccccctgacagcctttgacatgacataatcgcttccccaagacaactccttaaaagttcagagctagatttgctccccatcaatttttatttccagattttaaaataaagggaaataaggcaataactctggcacccaggagcagcgccgcatctgcgatagacgtgtcagaccaacgcctccccaacccctgccagccacccttcctgcctgtgggactgacatcgtggtactccagcagggtggacgccatgtctcccttctccctcaccttggctcagcttctgctgtgcagcccaggagtcaggaaggccgggctgaggatgctcatgcacagagaagcacagagagtgctgagggcaggggagggatgaagctgggcagagggagtacctgcctctctcgaagccctgggttcagtccccagcatcacatgcaacagatgtggctgtgcacagctgtaatcccaacactcaagaggcagaggcatgagcatcagaagttcaaggccactcttggctgcgtagcaagtctgaagccagcctgggatacataacattatgctttaaaacaaaacaaaaacaaaaaccactaatgccagctccatcagaaagttgtccctgtgtgccagacacagcagaaaatattctccatgaattgccttcatcaacccgccacagcctcgtgagatggcaacggctattgtccccatttcatagatagggaaactgaggctcagggtagattattgtccccatttcacagataaggaaactgaggctcagggtggatgtgacagtatgatgagaactgggataggagggctagggattctccctctcgcctcccttttcccaccttcctatgtctccattcttctccttctcccctctccttctgtggcctcacccctctattgtcaatctttcctcctcagaaacccacctgctcagggtccgagactctatgcttgtttctgctaagtagggccttcctagtcagcacctataaacacttctcaactgagtctggcaaggcctcaagggccaggtgctccctggattctagaaggctttagagagctacaaaggctcaggacactaccaacaattcagaccatgaccttcccaccacatgctgtctgtcgactgctttgaggtcagcccaccccagcctgggccacactagcatctctcagctctgtcccaggaacccatgttctcccagagagtcagagcaaacccgacggagggaaacactttgcaattggtgaggaggctggaaaagaaccctcttagaaaaggatgttgctggtctcaggttaatgacccagggccaagccctacctgggaggaatctgaggactgagcgacaggtagaggtcacaaggctgggagggtcgtcttctggtagggagtaagccagaagttgggcagatggctcaggtgtctgggcagcacacagaccccagcccaggtcacactcgggtccgtagttgggcactttgcgcagaatacagattgggtcaccctcaagtggtatcttcaccaccatgcttagccacaagtccttgttagatgagatgacctttgtgccagccttgtcttaaactccagggacaagcgttttccttaccctgggacatcagagagaccaacggggacagcaaatgtgttagaacacaaattccactgcaccattgacagccactctgggaagacgccatgagagaggtaccgaagccttgtagtgttcagagccatgatcataatgtctgctgtgggcatggatcatggggcaatagctgtccatcccaggtccccactgggcacagggaaagaagtcccctgcccctttttcctttgcctacagctcccagcatcctggaacgcccttccctgtctttcggtttggttcatgcactcctctcaggtgggggattctgagcttccagctccagacctcctgcaggcccagacagcccagatgaggcttccttaagtatgcatgtctccttcccacagcccgtctgtcatcttccctgtaacctgtggtcatctcctagctccaccgctttctggaccacccactgtttgatcactcagggtctcaacactttccccagagcctccatcagtagctcttcttccatggatatgaccaccccctggaggccatatcgctcagagcaacagtaccttgccacactgagttctgcccaccactcacggctactgtggttccaccctcaaccccacgccatctgagctgaagaagaaatttcccaatgtgctatgcattgccacagaagcatagagagccgagctgtctgctggctataccctttcacccacatcctttgtgtttgtgtatgtggggggggggggacacagaaagttccgtgctctcggtcccaccagcggagcctcctcccatccacagcagcctctctagtcctacatcctacatgtgtgtgatggggaaagtttctcagcagagcccaacattctcacttggtttgaggagctgctccaagggcctgcatgatgatgaatgtgtcaagtattactgtgcagcaccagggctcgctggagctgtttaaaaatgcattctggcatgtaaatttctgctccatcaatcctgatgacatgtcaaacattgcaattgtttcctgaacaaattgtgcctggtgcccttctctgcggatctgtgcatgggagcagaaccgcactcaacgcctgctaggttactgggacccagcgctgcctgcaaggtagcctggcagctgggcctgccgtgcttcagagccgaagcccctgtacgcatgcgtaggaggtctggacgtgcacgcgtgactacagtgcaggtgttggatgaggactgactgcacgtgggaccacaggcatgctgggagagatgtccaggtggctgggagaggcagggggaggactgcaggggctgatgggagcacttgagacaagggaggagtgtgtgtgtgtgtgatctacatggctcagggttagtaacctgagtgctctctgcctgcctgagccagagagaaaataaagagatgctggaagtatatacaagggaaagccaggataccaggaagagggtctatttgagacccagagagaaagggtctatgtataaagacttcagaagatgcagaacaggaggaggtacagtaatggaaagcttttaggctatagaaaggagttgaggtgttctgaggtccccatcccaacaggaaaagagtcatatagcagagtgaagcatccaggaagggcggggctgtatttggaaggaggctcagaggatggccatctagagctgatgtgagcaagtgggaaccagtggggcttaaggctcaacaattgcagatgagcattgaccaggccaagtcaagggcctacagggaggtgcggagacagctgtggtgtgtgtgtgtgtgtgtgtgtgtgtgtgtgtgtgtgtgtgtgtgtgtagggtgctggcagggcaggtatcctgggataggacacttgcgtctagtggaagtgagttagaaaggctctttgagagtactagctgggtccgagggcactttcagggagcacgtgtgagaatctattccctgttggcaaggggagtccctgggaacacatctagggtgctaggcttgctgtgagccctggacccactggcacagggagacctgtatactgagggttgggtaggtcagaggacatctgttttcaccagaatggatgccccaaccctcagcagagatgtcaggttggaccacaccatacccctcccttccttcaggttgagtctaagatacccacacagaccaagctcaagcatacacagagctggggatcttctttggaagtcagtggaaggcacctcttccaggttccagctccgctagctgaggggtgacatcttggaaaagccaagcccatgctataggagctgcccctctcagtcaaggctggaaggacacccaagcaggggcagagccactgagccaagaggagagccttgcctataggggacacctggctccgagggacacccacctctataggatcaggaaggtgtatggttaacagctcaggctacagctgccttttccatatcccagcactgcagctgtgtgaccttgggcaagctaattcaccttacagagtcccccccccccccgctccctccttcatctatagaatggggtgtcccatggagctattgggaaggtagaatgaaagcataggaaattcttgtaaaaatctgtggcttgtagtgaaatgctcaaagcaaaaaaaaaaaaaaaaaaaaaaaannnnnnnnnnnnnnnnnnnnnnnnnnnnnnnnnnnnnnnnnnnnnnnnnnnnnnnnnnnnnnnnnnnnnnnnnnnnnnnnnnnnnnnnnnnnnnnnnnnnnnnnnnnnnnnnnnnnnnnnnnnnnnnnnnnnnnnnnnnnnnnnnnnnnnnnnnnnnnnnnnnnnnnnnnnnnnnnnnnnnnnnnnnnnnnnnnnnnnnnnnnnnnnnnnnnnnnnnnnnnnnnnnnnnnnnnnnnnnnnnnnnnnnnnnnnnnnnnnnnnnnnnnnnnnnnnnnnnnnnnnnnnnnnnnnnnnnnnccatcaatgcactgagcagagactggagttttggaccagtctggggaccacatccccccctccctctccaggctcctcactcaccttgtcttaacctttggaattttctccccacgtgtatttattttttcccctttccgtccacagcagaaaattacacttgtgttggcattgtccatcacgaaaataagtgccatggctgcaatcacgaagctcagaggtggaatgcgctcgcccaggaaagcagttcagggcgaggttgaggggatgcctcagaaactgggcgccctggcacctcagcctggcatggctattcctgtagcaaaggcatgtggggcaggagctggccactggagcagtgctgaccacaggggcagtgctggcatgggtagaaacccaccataaggacgggagctgaccacaggagtggtgctgaccgcaggattggtgctgaccactgaccatggggacaggagctgaccactggagcggtgctgaccacaggggcagtgctggcatgggtacaaactgaccatggggacaggagctgaccacaggaatggtgctgaccactgaccacggggacaggagctgaccacaggggcaggtgctaaacacagggcaagtgccaatcatcacagagacaaggtgctgaccatgaggacagaagccggccaaggggacatgagttggccagggagacaggtgatcctgacccaccttcattccttctagactggggaaggcctggtgagggagacaaagatgtcctaagtccccaggcctgggtgtcctgctgcacacagtcgttagctctcctgccaacaccaggcaccttaatgcagagccttctgccattcagagaggcctctcagcctcactcccctgcctacagcctgttctttgctgtatctcctcagggctctggccactgtctgagttccactatctagctagttctttctcagctgtctctctattctgatgataagtcacctttcaaagaggacctgacactttggttcctcgtacagtatccagcacactggaaaggctatagagaatttactgagcagcaaggggaggggggcgggagtgtcataagccttcaggtaggctagctatcctccatctgcccaatatttccactgtgtcctgcccgcagaacctcacaaagagtcattcaatctccacgctgtcactaggttggtctttagaagctgtcttagggtttctattgctgtgaacagataccatgaccaaagcaactcttataaggacaacatttaactgtggctggcttacaggttcagaggtttagtccattagcatcaaggcagggagcatggcagcatccaggccagcatggtacaggaggaactgagagagagttctacatcttgttcccaaggcaaacaggagaagactgactcttcctccactgggcagagattcagagcccagccccacagtgacacagtccctccaacaaggccacgcctcctaacagtacaactccctatgggccaagcatattcagaccaccacagaagtaaccagaatttgaggtgtgtcatgaaccccaggttacccctgattaatcttcagggttcctcactggccacaggagcatctgtctgctcatggccgcaggtagcaacaagtgggatctgagcttttcctttaccgggagggaagtgggggctcatgagtgattttcaagaccccagattatgccacgcattccctgagagatgtgaccaaggactcctggccaagaccagggaatgttccgagggctctgtaagggaagagtgggtcctgatggtcaggattttgaatgaagggatggggtaatgcactatgtgaagagtttggggtgtgtcagggaagatggggctacaggaatgaaggttagctgggatgtgactagccttgacatcaggatattggcctggattagtttatcaagtaacaaggaggcattggagtttttttaagcagagaagaacagtaatatttttttaaaatatatttatttgtatatttgtgtgtgtgtgtgtgtgtgtgtgtgtgtgtgtgtgtgtgtgtgtgtgtgtgtgtgtgtgcaggtacctacagaggctagaagatagtatcatgctccctggaactggggtcataggttacccatgagcttcctgacatgatgcgggaaaccaagcttggatcctctggaagagcctgtgctatgtacagaacccaaggctttgctgatggagtgaacccttacattttgccaaagggctggcgtcttggacttctgctctgtcaatacagcagcaggtagtgagtcaccatgctgaatacccagcagcaagcttcatgaagcacttgttagtgcccttaaatcctgagccacctctctagtccctgtagaggccatcagattctctagtaaaatgtactagtatacagatgtcctgtgtcaatctagcacccagcagagacaaggtggggtggtctctacacaagtaccagaagggggcgctagaggatagttgaagcgttcacctggaacccaggattgcctgggtagccaggtacagtctgagacacctgtgtggccaactgtgccctctccccaccatcctgaagcctgacatggaggcctcaggagtatcctgtaggacacccatatactcatttctagactggcagggaagagggaggaggggtgtctggaagggaattctgttctctacctgcaggcctttgagcacatccttatgtgagcctggcctatctgtcacttgatacggcagtggacatcttgtagctgctgtgagcaagtctgaggaaggaggtggcttattggatgctcaggcagacagagctgcacagggtggggccagagcagtgactgccagactgcacagagtactgcatgggtgactagatatccagccctgagggtaacacactggggtcctgtatccctcacggcacaagatggatgtaagtggggatgtgagggcaggtaactcggcatcttggagcttctgtttgttccttgctaaaggttgctcttccataacagagaccaaaatgcctgacagaacaagaagggagggaggatctatttcaactcatggttccagagggtctaacccatggtcctttggtctcatgctctttgacacaacatcgaggtaactggagtgtgtgatgagtacttgaaggatgcacacaggaacagggccaggtgcaatgcgctcccagggcccgcccaccctagtgacctacttcctttatctgggtcacacctccccagatagcatcccagctggagaccaaaccttcaatgtgaggacatttcatacagaagccacaatgggggacgggttatatgtacttacctggtagggatgtggtcacagctaaagagacttacagggactgggaggacagctctgcagtcaaatgctgtgcacaaatgtggaaggatctgagtttgatcctccaaacccccatagaagtgtgatggtacctgctagtaatcccagtgctggaaggcagggacgggagacaggaggatctgtccctggggctcactggctatctggcctcacctgaccagcaagccccagatccgagtgagagaccctgtctcaagcaaggtggacagctcctgagggagaattcccaagattgacttctggtctctatacacacaaacatgtacacacaggtatatacatataactctacacatgcacacacacatatataatacatacaaacatatatacatatttatatacacatgtatacacatacatatgtacatatatatatgtatacatacagacctacacacatatacagactcatttattatatatattattatatattaatgctgtattatactatatgtatacatacacacacacacacacacacacatatatataatgtagatgggcacagatgtagttatagacagatatacaagtatctcactccaagccccagctaggcttcaagtacatctgccagcttgtccccaccctgcattggtctgcccaagctaaaggggctgtaggttaaagcgttaaccaaggctggattcaaggatgacaggagcaggtgagacaggccagagatgggccctaagcttggcagagcagcacagcctactctgtccttgtctgtggtcaagcctgaactggaggtggctgcacaagctggggacagggctagtgtggtcccttcccacctgataaggcacagagttcttgacctcaccttggcttcatgtcgttgagaaatgaaagacttggcgctgggcttacatacatcacacagccattaggtggtgacaccaaagggctcaccaatgttccctcatcagctttggtggcctgagcaggcagtgagaaggccctagggaccagccaggctctttggaagctgtaccgagtctggcccacccaggaaagggagggtggtccttggggaaaagggcagcggctacgttaagatggtctcaactggtccccaagggatcaccagtggatcccctaggcctcagctattctaggcccaaactctagaatgaagggctaggttaggggagtcagtagttcttcctgtctgaacagtccacgtgctattctgtagggctcccaaagtgaaggatctacacaggaacttctcctaaggcaagaacatatatatgtgtggctgctgggtcacttttgtccttctcctccctgggtgcccctttccttctttgcctttcaaatccttctgtattagtcaggggaacagagccaatagcatgaatatatattgaaggtcaatatattagattggtttatgggataaggtctgggtatcccagtaatggctgttatacgtgatgaagccaagaagcaagttctcagtgcacaaggctgggtacctcaggatcccaacctagtactgaaagtctagaggactcatggagaatacctggtgttcaatctacttggaagccagaagatattgggttctgatatcagtaaagaaccaccacctccagcagcagcaacaatagcagcagcattaatgtagaggaacttgccagcaagagtgaaggcaaacaggcaaaattgcagctttctccttccacctccttttatgtgggatgccacccatgtctagcgtgggtcttcccgcttcaagtagcctgctcaaggaagcccctcacgtgtgtgcctagcagcttgccctgtgtttgattccagattcaattgtgctgacaagcgtgattagcaccaaccttccttccgtctctcttcacgtttccctcccccacattccctttctttctgggtgtttcccattcatttctgggaacccggaggcacctgttcctgctgtgtgccaggcactgtgctagccagagcccagcaggcagaagttctactctgcagtaccaccagccctttcctcaaacagaggaggatgctgttccggtcctacgggggccactggcctccattttatgtctctaccccagtccagcctccaccaaaggcctccatgacatggctccagttttttctcagacacagcaacagcgctggtgtctggtgataccctgaatgctggtttgcccttgcgatacagggatggaaggaaggaattttcccaaccctcccttctcctccatccctggaaggggagagcaaaggcaaactcagaggagctatggttgctcagtccctggagctcccagactccctttcttctggaacaatcctctcgggttagagggggtcactcagaagccgtgggcacgggatacaaagtgagttttgttctgtttcaagctgtgagccttgggtgaactctttgtggtgcctcagtttccctgtctatcatttgggtctgttatagtgatggcccctctgttgggggctgggggagatattggtaatggcaattgtcatgaggaatggcttgggcagaagagcccctcgggggtctatgcttatatttattcagcacatacactgaggaagatggctggggtcaggatgtaggactggggtctgtctgcacacagacgctaagatcattgctatggagacatcaagtggaaatgggtgcaggaggcaatgccctgaaagcaggcagcccaaagcactcagaaatggcatctttatgaatagccacattttctggttaactaaggtcttaattctctggatataaacatatttttcatttcattcatttgggatagaaatatattattcatctatctgccttccggaactggatatacgggaacacgcattagcgtctcatgaaaattcaggtttattataaagaatgtagaatttaatagatttcatagaatctgggagctttaaaaaagaacctcagaaaatattgagcagaaaggcattaaaaacgtattcttagctgcagtctctattcacatatgatcttagagagaagcctgaggatagagcagatgtaagtgagccccaaggtcagcccaggcctttcccaactggtacgtgggggcaagccacagctagccagacctaaaactttagcctaggaaggggccagggttcttgtcgaggacagtgacagtgccctgtgtggacagcctgctgaatattcaagacagaggaaaggagagggaaggatggccagatatgctttagcctgcacggtggattgccgccatgttcagggtgaagcagaagccgtttaccccagccacaaaagccttctagaaggaccgtgctctccagtgtaccccgaccgccatctgtggccattgaccaccttgctggccagcctggatgggctctgggcagtttggttgggccacaggaggcatttagaagtgacagtgctcggttgcctggggccctttcctggcctggcaataacaacctcatcttttaccaccgcaggcaacagacaatgacgtgggcacttttggggaagtcaactacttcttcagtgatgaccctgacaggtgagttcctgccccagccccttggcagcagcctctggtgactcacagagtccagcaaactgctctgtgctcagagaagcccagggatcagaacacagagcagctgctctccgtgttgtggtgacccctgaccttaaaattattttcatttttacttcataactgtatgttttgctgccattatgaatcatactgtaaatatttgatgagatgcagatatctgaatgggacccctgagggtcacaacccccaggttgagaaccattgctctaaagtgagtctgtcagtctgattctcaccagaatcagttggctaaacccctgagctctctggtatagggtttttctgttcgggagtagagaatcaggcatccatgatgcccaggagttctgacaatactactcctgctaccagcagccacagaggacatttgagggctgactgtgtgccaggctctttgtcaaacacttaccatgcaggcatcagcctgggtcatcccttcctggtgacagggaaccccattctctgctctctctctcattacgtccacctgataggaaattccagctcagagaggctaagctacctacagaatgcacacaactggtagacaataggaccccacctctgtacatggcctttgccaccaggacacacagcctctgccaccaggatgtggcactcagcaagcagcagctactaggtagacttcttgccagaccccaccccccatctctctctctctctctctctctctccccccccccctctctctctccatcagtttctcacagggcaagggaaggtctgtgaagttaacatgatcaagacctggttgaattcagagggcaggccggctgctaagaataagtagcctagagctggggaggtggctcagccaggaaaatgcttaccctgggagtatacagacctgagtttggtctcaggaacccatggtttaaagtggggcgggggtggtggtggggaagagccaggcatgatggtacatgtttataatcccagggaagggtgggacaggaggatgccctggggctcacaggacagatggcctggccaaatcagtgagagacactgtctcaaaacgcaaggtagatggcctggtgtctgaggaatgacagctaaagttgagccctggcttccatacacatgctcaaacaagtgtatctgcatgcacatgtgcacacatacacatacacacacatacgcacacaccacacacacacaccgcatagccccacatttttgggactgactgaggcagactggctgtgagcttatagtcacagtccacacagtctatgatcattaatcaggaagagtctaggactctatcaggtgtgtcacaggccttgttggacactctgtgacagctgcattaacgctagatagaggcatggcagtggctgggtgtgcagggcagagtagctctcgaggggaacctggtcatcttggctctttcctttcttcccacctctggacccagggcttccctgtcccgcaagctgggacattccagacatgaatgtgagtagctgctgaatcggcagagcatacccatggtcctgccagctcccgtgggtttctagagggcatatttagaggctccagttgagggttggtctcactggcccatttgatgcccagagtacctcttcccaaaggcttggtccctccagcaattgacaaggtcagctccaagagaggatccagcaaccttctccaactatcagacagcagagtttgtatcccaggttctctattatccaaacacatccctgaaccgaagtgcctgctcacagagagggacctgtcacccagtgctcagcccctacaggagctcatccacagcttgctctgaccctggcatcctctccctcctccctccccaatacaggttctcactggacaaggacacgggtctcatcatgctgatagcccggctagactatgaacttatccagcgtttcaccttgactgtcattgcccgggatggcggtggtgaggagaccacaggcagggtccggatcaatgtgctggatgtcaatgacaatgtgcccaccttccagaaggatgcctatgtgggtgctctgagggagaatgagccatctgtcacgcagctggtgcggctcagggtaagcccaggagccctagacttgtcatctctttccctgagttattgcaggaggtgctaaaactcccatctacatgcccggggctcctctgagcatcacctcctgccccctggagatctagagagacaccttcagagtgtctacctcaaagcagatgtcaggccacttagcataaaatcacccatgttccccacaaggccatagagtggtaacagtccctttgcaagaccatcagactgtccagagaggagataaattggctcaataggaaaggacctgccattcaaacatgaggacctaagtttagtcctgaacgctcctaaaaacctgactcttgggctgcagaaatggcttagaagtttaagagcaatgactgctcttccagaggtcctaagctcaattcccagcaaccacgtggtggctcacaaccatctgtaatgggattcaatgccctcttctggtatatctgaagaaagtgacagtgtatttgcatacataaaataaacaataaatctttttaaagaattagctggctcattacccttcacgcctataatctcagtcccgaggaggggagacagaaggacctgtgttagctaactgacaaggtccaattgcaatgagagaccctctctgaaaagataaggcaaagaacaatgaataagatatctgatgtcaacccctgccccccacatactcacccatctgcatgtatgtgtgtgcgtacacttgagcatgtccacacacatgtaaagtagccacagagaccacaaaaggaaaagcagaggagagatgggcaagaaagacatagcctgtggggagagagcagggctcacctgaaatggagactctgtccttcacgagtttccctgaagcaagtccctagtgcacagcacagatctctaaccagggacttcatgtcccctcatctcacccctatgctcatgtccaaagtgacaggacccagggccttcccttggaacttgtttctgaaactagccaatggtgggaaagggtacacagaaggtgggactgtatgccacccagcctggcatggcttccccggagaccctgcccttccctttggcttggccccaggtacagccagcaagcggggaagccctggtgcctctccagagtcagagacaccctggaaagaagctaattcctccctccagccagagcagggaggatccctggccccttccagatgcctgcctcctctgccttgctacatgctacgtgctgtatggtacgtgctacatgcgctgttgctagaacacaacggctgaggccgcatacattatatcgaaaatgaagtaggatgtgtgtcaatcaggtaaccctctgaggagcactccttggttccctcgccatgctgtagacatcatcatgattggatcagaggaggaggctcacacagctcactaggaagcaagacagagtcagtcaggcatgctttgtctcttgtcacttgatcttgagggaactaaccaggatccctcaaaaaactacgttaatccatgctgttcagagcctccagacaagtaactacctcacactagactctaccccttaaaagttccactaccccttactgcctcaccctgaggaacaagccatcaccatacggacccttgggacaaactaattcccaaccatggcaggcttatctcaagggaggcactacatcctgaagtgttgggatctgaaaacagagaatacgggacattgatgagccgagtattttctgagggatcccagccccactttctaggctccaaccttgcttttccactttccagcccatttctgagcccacaagggggaagggacagagtttttctgggagccagagagtgggtttctgttgaggaacaagagggtccctgcggtcccagagcaggaagtaacctgagctacatcatccaaagaagaactgagaggagctggcctgcctctcagccaccctcgcctgtccccagggctttggtgggcttactgggccctgactacactgttccttccaggcaacagatgaagactcccctcccaacaacctgatcacctacagcatcgtcaatgcatccgccttcggcagctacttcgacatcagcatatatgaaggctatggaggtacgagtagaaacagggcaggaggacccagtagggaagaaagttggtaggatcctttctgtcacaaccccctccggggggtggggccaccctccctctcccatacttttctggaagctgccaggtccctgtggctagaaaaggatatagtcagaggtcatatcttcccaaggccaacagctgtctcaagccagccagaccttgctctgggtctgaggcccgtagccagccatgaggtacagctggaagcctgaggtgactggagttgatgaaggaagcaggctggatgaactgtcctctgggcaggtcggtgtggctacctccagccttcgcaggctgcagccttttcttgagggcagagtctctaaagtcatctaaagaaatgggagatgatgcaggaggccttcctcagctgcacattctgtggagttcaggagaataacgacaaagtcaccttgttaccacaatagtggccggtgggtgggctgagcacagagacgggcgctgccagtcagtaaactaagtgaaaggcccaggaggctagccacgctgcctctagcaagggaaatgctgtagctgggtggctgaactctgtttgttaaggtccttgctcctgctgttccagtgatcagtgtgagccgccctctggattacgagcagatacccaatgggctgatctacctaacagtcatggccaaggatgctggcaaccctccgctctacagcaccgtccctgtcaccattgaggtgtttgtaagtatgcagctcactggccttactcccccagggtggtgaatgcatcttctcagagtaccagaggcctcccttgcctcagcctcgtggtaaaggcctgtgtcctcaccactgaaactgccccaattcctgctccctgagcatcgagcatcgcgccattgctttggttgccatgctgcctgcctgcgtgagcagagagacccaggggcctggagctcagtgagaggtgtatgaccctgctttggtttcatgtgaggccttgggatgtcttccggaaagcaaggctggagagagagagagagagagagagagagagagagagagagagagagagagagagagagagagaggatcatgtcctcagaagtcgcgttccatgaagtccaaaggaatgacgggacgctcaccattcctcttcccagtccccctctgtaccctcttccttttccctgcctctctctggtcctctgaagatggaaaggggcctgaacgcaacctgctgcctgtctgacatgaatatcaaatacaccttagcgctttcctgtctgaaattatcagtctccgaatccatctccacactggttcatttgccatgtgccgctccctcagccgcactgggggcagggggaacctagagcgtagtctgacagcaaggcccacgggactcctcctcctgggacccccacacacacctgagcacacaccagcatgccccttccttatttgcaaggaagggtgaatgaatgtcagtaggggttaggattaaattgcactgtcagctgggacgtactaggggcaggggtgggtgggggtggaacacagcttaggaatgtccccagtgtccccagagcaggcttgcagctgtccttccagtcgcagccagctccaggcagcctctggggcagccccacaccagtcctttaattagcccgaggctgggaccagcttccagacccctacttcctgactcacctgggtggagttggggtgataagggatcttcgtgatgcctaaggaaactcccaggggacaatgggagcagggacactggggtggcagggaaaggagcccaggcagagatagggacagctcgggatgttcagagggtcaggactttgctttcgagagtagcaaaggaaaagaaaaggagactcatgggagtccaaaaccactgccttaacccatcaaggtagccccaaggagccagaaaatgcacagtgtctagtgctcatcatatgacctctggccctgaccacgcctccctcccagcccagccttggtttccccatcctggtcacattgccccttggcccagccaggcccccctcccatccaccgcccccttcgttccgtctgcatttgaggcactttggagagtcagtatgatgctggtccctcagcgcccaagggatgtgggatgaaagaggaggagctcaagggtcatgcggctcagaacccgcctccgttacccactaactgtgtgctctgtgcttctcgacactccaaacctcagtgttctcatctgtgaatggggacagttatggtgcctgccccgtatgttaccatgggaagggcttgagcccacacaggcagtccctggcatgttgcctgtcatcacagatgccggggcaggtgttgtatcctgtcaacaacagcatgcccagcctgaccttttgcaaatgagagctctgaaggaggtggggctgagcaggactctctaggctttggaacaaggaactaggaagggtaagggtaggggtggggtggggaagggggagggggcatattctagtttcattctgctgaatgaatgaacgaattcgttcacactctgaatagatgaagcccttcttggggaggaaagggtctatttggctcacacttccaggtcacagaaagtcagggcaggaagtagaagccatggaggagcactctgctagcctgtcctccatgggttcatggcacttagctttcttatacagcccagacccagctgcctagggctggtgccgcccacagtgggcccaatcaatcattgatcaagacaatccctcagacagggccacgggccaatatattgactgagactccatccgacgactctaggtagtgtcgagttgacatttgacactcgttaggacagggggagtagggagacaggttgaagtggtctactctgacctagacaggtgaaatcagccacggaaactaaaactcactggtcccaccatggctctagaggcttccagtagcatagtcccgtctgggcccttggtagaggaagatgaggttagcagaaagaaggctaccgaccgtatccttgtacttgctagtgacagagctgggattgaacccacacctgaggaacatctgactggacattttctcaccagtcatagactaggaaaactgggtcatcctcactcacatgtgactgagcccagtactcttcagagacccccacccctaccctgtgaataggcttaactgagccagggctgtcttagcaaataaagtacagttcttatggctataatctgggaggctgaagcaggaggacagtcatgagttcaagatgagcctgggctacaggcagttctaagctagcctgggtaacaaatcgatacccaatctcaataaaccaaaataaagtatagttcttacctgatggccctgctgtggttgacagtagattattgctgcttcctgttaaggcacaaccaggctgtctgtgatctgcccttgggacattgaaatctagactgtgctctgctctctgtggctcagtggagaaatagacccgacagggcctcttctttgcctcagtccctccaggggaccagagcaatccttttcccagtgtaaatgaacgatggggtaatagccaggcagaagacactgcatgggtgtgggggggagtgattacaagctccactgctctccagttaggtaagctagcgagcccctattgtcacatcctcctgacactgagcagagagagcctcccgggggtctgcacatcccctgagtctagtccagccatctggaggcaggagcaggcggcaacaaagacaggtgccactgtggctctcagagaacatcagctcagctcccaagcagggcatttggacaacacagtcactcgtgtctaaggaccatacttgaaaaggtcaccgccttcgggttgatttcgcacgtgggtgatttttaaatagctgtcattctgcttagcagcctcctctcttggccaaaaggattttctcttgccttaaaaaaaaaataaaataaaataacagaaacagctttcattgaataattggcagaaggctccccacgcaggctcgtgtggggagaggagagacggcttgggcaaggaggaggatcaggtgagagaagccaggtgatcccttttcatccgctgcttgttggtttttaataaagaagtcaaactcggtttgtagatttcccattaggggacaataagcttttatagagggagccactgaattagaactaatagcaagtacagcgccagaatccggggaaatatcaccgctaataagtttctgcctcgtgctccgtagctgacattctctgcgttgcttcgtgcagctgagcagaagcctcccagtgtatacccaaagcacttgagctcatgccagcagcctgggtgaggtcctgggtgacctgtggggaccttgggtgtcaggagactcccaaagctcccagctccttgggaagggagtgagcctgtacgcaggacagagcgaggggacagatttgggaagaaatggagcaaatcaattctgggaacacaccatgcagcaggctggggatgtcccgagtctggggagaggcgggccaagcagcatggtctcatccttttcctgcttgctcatgcagaagaaaccgtagcaaaagagttcagcaaatgcaaactctgtcccctggaggagtctccaggtccctgagctctgaggacctagtagtggggcccattgaatattgcaacatggggagaaaggcggaacactcagccagctcctgagctcctccaatgctctgttgagctgaggaggggagcacggagttgagctggagtcaggggagccagagcgtcttcagtgaagaaggcaactgggaggaattcccggtgagcgatggcagaagttggctctggtgagagtcccaaagatgggaggcttgcttctctgattgaagagtctagggagctgtgggctgcacctggcacgggttctccccaacacagggctcatctctacctggtctagcccctcagccaggcttcccactcccatccctagctgctgcaggctgagccaaaggaaggaactggcaggtaccaggctgcagaccagggtgatccagaggatgcgaagctggtagaccaagctggctgtccaaccccagctacagccagtccaggctctgggaccagcctgaccactacctgcccctgtacactttcatatctgtgctactagatgtgcctttctccttcgccctttaaaaaaagatttttttaaatgtacattgatgttttccctgcattgtatgtctgtgcaagggtaccagatcccctggaactgaaattacagatagttgtgatctgccatgtgggtgctgggattcaaccgggaacctctggaagagcagacagtgttctttactgctgagccctctcttgaatcctcttcctcaccttttttaaattaattaaaaaaatatatgtgattgggtgttttgcttacatgaatggattgtctctgtaccagctgagtgccaaatggcagaggccagaaaaaggcatcagatccctgggaactgaagttacagagagttgtagatgctgggaattgaacccaagtcctctggaccagcagccagtgctcttgaccattaagccatctctccagccctctctcttcattctagcagagcttctagaacctttcactgtgtcttgactcagctgggagagatcaggtggacgctggataggaacgaaagaactaagggactgggcctctggagtaagcttggagtgcagctgttaggtgggagactgggagctggagacgagctgactgctctcttactcagtgtctgtctctaaatctcatttcatcccccgccccaacccttacatgcttccccaaagaccacccaacctatccttcaactgacctggcagagggactcctggctttcataataccctagcctctggtgatacatagaggccagagaccctcagggccacccttcccaaactgcccctcggttcctacttttacccaaagttggccgagtaccttcccgacatgctgatccatgtgctttccttccaggatgagaacgacaaccctcccaccttcagcaagccggcctacttcgtgtctgtgctggagaacatcatggcaggtacagccttggtacatacatttgggggaggggccagtgtcagcttcccaggcatccataacaaaccagggaagtctctgggggcatctggttattgtcagctaccatgtgcaggaccctcattgacactgggtcacgttcatctgcagccagtcccgtggaaaaaagaataatagaagatgcttaatcacacagtcctgatgaagaaatctggagtgtggggtgtcctgagacttgctaccatgagtcagatcccaggagccatggcttttagtggggtggctttgaagggtagtcgttgacgtatattccagtagaagcctggcaatggaaggcccaacttgagccagcaccacaagttccacatgtgggtccctgtccttgaggcagaccggcagcttcaccttcacctccaagtgtgcagtcctcatgggatatgcatatggcaaagacttctgagccctggtgtagagtaggagacagtatccagcacggctaaacttagagacagttgacatcaatatagccagagctagaggggtgcctttccatgtattggggcctgagcagagcctctgggtatcagtccagtatctgaaggtgagtgagttgggtgccaggctgtgccaatgcccatattcctgtgtctagcatcccctaaagattatccctaccaaagacactcagtgctccctaccctcccagacgctctgcaaagacaaggtctttccctaagatacataatcctcttcctatctcatgttcccagaatttaaaaaaagtacatctggaaggggtctgcctgatgcatgcttttcttggagactgctggtcctccagtgcctggcacctgtgtacttctcccagggagccttcccagaagcccttcatgcagataatccaatgacccctgttgggtcatctgcagaggaagaagtgtctaaggtgctcttctgagggccatggagctctaatctgggatgacacccaacctctgagtgcccccacaagcaggctggtgctgcagcccaaagcctgggtgggcacagccataagacagaccacttatggggtctggccagggccgcagagatagccaacccctcctcaaacccaggattctctgtagatggaaaagacgagaaagaccaaaggccttcttcactggatgttaacgagaaaataaagccctttataaattctgccatgaataagataaaacaggaccaacaataagatgcatagtaaatgtagaataatttaactgggtgcttggtttctctggcctcaaatgaatgccggtggatctgggtggatttgatccacaggacagccaggcaaggttaggggacattttgtgctcttggaggctgggccaagtgtctggggggaggggaaaggagaagatcctatcccaggcccagcctcacccatgtggagacccgaacccacttagcctcctagggtaactcatctgtcaggctctctaactcctagaggcacggtcactacaggttacaggatgtaatgtcatggagtgaaagggtcagaagagcaacctcctacctctctgtcttcctaaaggagccacagtgttgtttctaaacgccacggacctggaccgctctcgggagtatgggcaggagtctatcatctactcgctggagggctcctcgcagtttcgcatcaatgctcgctctggtgagcccccaagcctgctgctctgcaccatcaggctgcccttcctgggccagtcagggactgtggtctcttcccctgctgttagcagcaagctggacttaagtgcctggttgcatctctgaaatagtcactagagcgctaattgttcatcttaccctgggccacctcaccgcagacatggccaccatgctgtgcctctcaagggcaaagaaaggctaaagctgttcattttccaaagagctggcactcactacccgtcaggggtgtgttcacctcttatcatcttccaccatggctgcttacttgggtcttaaacctgggctcctcttcatacacaccagtgttgcctttgaactgtcgtgtgcactagagtcattgtatacactagagctgttgtgtgcacaagagccattgtgtgcactagactgtgataagcacacctaaaatcagcctataggaagtacagaacaaagttcctcctgttatttcttctgtatattcacctggggctcccatctgtagttctgtttgtcctgtgccctttctaagactctctgtacacctcacctctctctcctccttgaagtaagagagagagaacagatcccagactgttcagcatgcctggggagaatttggggctctgtgtgctcatttggaaggtgcctatttcaatggtagagcataggaagactacagtatgctcctcttagtgtccaggtcagctgtatgggtatgctggtcacctgcttctagggggcatttctgtcagtttgaaggaactctagatgctaacaggcttatcccagactctcagtgactcacagcaataggaacgtacagcagtgtggcaggtgtccagtgggtggcctttcctgtgacaattgtcagcccaggtcccttccatgttgtggctccaagttccctggaaaaggagaaaacattagggtcattgtataaggcagatctgacaggccaggcctgaaaggggcatctgtcaccttcatacatgataccttagccagagtaggcaggggctatctcattactagaaagcctggggtccatgcctcattcatgatcaccattcagcaacatcttaccccggtcagggagcaaggatcttgccatccctgccccgggcagtcagtagtccagcaggaccttcctgttgtctgtgactcctggaccaaggttggccttccagctcttactcctgctcttcctctcaaagctcttgaggaagatggctgctatcgttgtgtacaaggacagaggaggagggccagagtcacaggagtctctccttccacatcggccttcctcctaggctcagggaagcctccttagcaagcctcatttccaagaagcaatggtcccacctcagaatgtgcacagggttcagttccatgaaacccagggacagcaaagcattgtcatcccttagggaaaatggcagtgtttgcgtgtagcccacacatatctcccagcacctttaagtcattcctcaatcactaagaacgctgcatgcaacatgtattctgcataaagagctagcctgggatagggggatggcccagtggtgcttgctggtcaatgtgagaatgtaagctctgcttctcagaacccacagagagctggatgcagtaatgtgtgtctgtaagcctagcactcctgcaccgagatgggaggcagagacaggtgagagtagcttacagatgagccagcctaggcaacatagcaacaagcaaggggcctcatctcaaatataagttggcaagttaggattaacacccaaagttgttccaggctacgctggccatgtgagacctctatctcacaaaacaaacaaccaacaaacaaatactggttacactatactgtacaaagaatgacaagaaaaacagtctgcatgctcaacccagataaaattcttaaagcatttctgatccaaggagaggttagtccacagatatggaacctgcagatggtgtctcagcaccattcatgaacacaaaccaagagcccagtactatcttcccttccagcattacccccattttccagatgagaaaactgaggcaagagccaaactcaaaattttgactgaggtcactcagagtttgaccagctgacccagagctcagttgttaacttttagggcccataaaaccatattggagctatatcccaccacccacacatcctgctgcaggtcggggactccagccccaccccagggcctacaataaggatgcctttctgctgctgtaacatgtcctcaacccaaaggtaggaacattttcctctgaggtccttggtcgcattagccaggcctgctacactgaggtggccttaattgattctaatttcctagatgggaaaagccatctatcacgaatacaagttcacgtttaaaactttttacatattaattttcctagccccagcaattcattaatggttgccacccagtgaggagcatggctctctgggcagaccttggccaggctgtggtacctggtgctggcaccttcgttgccttgtttcccaactctgactcctgctcaacccaggacaggtggtatgtcggggagagaaatgtgaatgtaaggggactcagggaaacagctgtcccaatgcccatgttagcacagagatgttaagtagcttgcctcatgtcacacaggtcagaaaataggaacaaaaaaatagataaaaaataaaataaaataaaataaaataaaataaaataagtaaaatggctaccacataagcccttgcctgccttgggaaactctttcaatctactggaagaaaagaatctgtttctgagaggtgagagtttcacctatagtttcttcattgtgtgtgcacgcatgtgcatgtgtgtgtacatatgttatgcacgtgtgtgcacgtatgtgtgtatgtatgtgtgtacatgtgcatataagtgtgtatgcaggcatatacagtatgtatgtgtgtgtatgcatgtgtgcatgtgtgtgcgcctatgtgtacttgtgtgcatgtgtgtgtatatatgtgtgcatgcaggtgtgtatgtatgcatgtgtgtgtgtatatgtgtgtgcatgtgtatgtacatgtgcatatgagtatgtgcagcatgtgcagtgtatgtgtgtgcatgcatgtgtgcatgtgtgtatacctgtgtgtatgtgtgtgtgtgtgcatgcatacatgtacagtgtgtgtatgtatgtgtgtgcatgtatgcatgtgtgtgcacatgtgtgtatgtatgtgcatgtgtgtgtgtgtgtgtgtgtgtatgcgtgtttcagtacatgaagacaggaggctgttaggagtcctcaaccactgtccatattagtttttgagcagagttcctcactgaacctgggggacatggagctcactgattcagccaccctaaccaatgagctccaggaatcctcctgtttccaccttccccacagctttggggtcccaagtacatgctgccttgccaggctttaacacgggtcctgggattgaatttgtgtcgtcacgcttgcagagcaggtcctttactaatggggccatcccctagccccaccctttacctttgtaacagctccaaagggaaggcagaaggcgttctgggcccctcccttctgaccctgagaaaaccaaagctcaaagagcttcagcctcctcctggggacatgcattccaggaaggatgttacagacagaattcacatccgggtctttgttctccaagtagaagccctccctggtaccaccatgggcaggggtttgtcctggccatagcgatgtgcccagctctgctggccacggctgctctgggagcaccatggtcaaagccctggcatcagtgacttgatttggtcctggtgggagtctttataccacggaaatcaacaaccgacttttgttctctttggggagctgtctgtcaaacacttgcaggtacaagactaccaagtggtctgggagatggatggctccgttggaaaagagcttgtcatgcagcctgagggcctgagttcaattctcagaacttgtataaaactgtcaggcatagtggcacgtgcttgtcctccagtgctggggagacagacacacggattcctgggaatcaccagccaccctgcctagtctaagcagttagtcctgtgtcccagtgagatgcaacactcaaagttgtcatacacatgacaacatacacatgtacatacgcaccaagaagcaataaaagggctacctgatgttccagtgacacagaagaacaaaggagagcagaacacagctgacagaaattgtggtttattttaaatgtatcttgtttgcacactaaaaagaaagagagaaagagagagagggagggagaaggaaggaaggaaggaaggaaggaaggaaggaaggaaggaaggaaagggagggagggagggagagagagagagagagagagagagagagagagagagagagagagagagagagagagagaaagagagaaagaaagaaagaaagaaagaaagaaagaaagaaagaaagaaagaaagaaagaaagaaagaaagaaagaaagaaagaaagaaaatttctgctggtattattataccaatgatgggtatagtatgactgttaattcagaactctataggcttgcacactgtaggcccacactctgtaggctctcacactgtaggcccacacactgtaggttaggacactgtaggatcgcacactgtagcttatacactgtaggatcgcacactgtagctctctcactgtaggtccacacactgtaagctagcacactgtaggatcacacactgtagctctctcactgtaggcttgcacactgtaggatcacacactgtagctctcacactgttgacttgcatgttggggcctgagccacaagctatagcatgtgtgaacttcagcctgagctgtgcccgcctgccactggcgactgtactcccagtgtctgtagcctagatagagcttgggcctattctgaggatttccatgacattaactaaacgacccccacaatagccctactgtgaaactgtcctgtcacagttccctttgggcaggtatggaaactgaggcacaggggacggaagtaactagagtgagctggtaaagccagaaaaattacatcatacctaagccagaggtgtttgtgagtgtgtctggtgctaagtggccctcctactctgccagcccctgcctcgttgtggggtactgtcacccagctcttaggccccctctgaaatgcagctgctttcccctttcaggcacacagatgggcccagagtagttgcagaggccatagtcgcatgactggccaactgtggcttgcaagtatatctctacgtctatttccttctccctgcatgcccccatttacttatccacctgtctgtcctataggagaaatcaccaccacgtctctgctggaccgagagaccaagtctgaatacatactcatcgtgcgtgctgtggatggcggtgtgggccacaaccagaaaactggcattgccacagtgagtacatccctactgtccaggtccctcctccctgctgaccaggtccctcctccctgatgaccaggtccctcctccctgctgaccaggtccctcctccatgctgaccaggtccctcctccctgatgactagggccctcctccctgatgaccaggtccctcctccctactgaccaggtccctccaccctactcttcaggtccctcctccctgatgaccaggtccctcctccctgatgaccaggtccctcctccctgatgaccaggtccctcctccctgatgaccaggtccctcttccctgctgtccaggtccctcctccctgctccccttcagttctccttctcaggcctctgggtaccatgtcctgaaccagcgtgagacactataaggtggtatctgcagacagtggccatggggaaaggaaggccttgcctctgggacacaggacacccagaaaagcacaatagaataatacttccatgctattccaaaggcccagcagagtagcaagcggcagaggacatgaaccccaaactcctctcatgctctccaaaacatctaagcagaagccacacttcccgagggactggccactgccccacctacaaacacctatagtgctgagtctccctgcctctgagaagggaaggcccagggtcccatcaaggccgcctcaccacaaaggagcttcgggaggagagtgggagcctggtggcagaagggagagcagggacagtgaggagcacaaaggggccctgagacagaaacacccacagtggggtgacctggtgcttcagccacatccagtccccctccccacattgtcctgggctccctcgggaggcctcttgcttcaccttgctccatggtccttgcccacctgggaaagctgccccattcttgccaccagaggaactgggaagctcaaaggatcctctcaggtccccaactgggggtgtgtgtcatctttacctctcccaagaccaagtggctgagagaagtctggattgcaacgaggatttcagataccatatctgttctctggctcctcctaggacagcacctacactccctccttgggacctagccccaccttgcccttgacaacctaggctctccttgaaataaggtgacaggcatagtgattggaactgagacccctgcatgccccccgcccctgccctttgcccttgtcagccatcacggaccacagcgccccttgtggtccacaggtgaatgtcaccctcctagacatcaatgacaaccaccctacctggaaggatgctccttactacatcaacctggtagagatgacacctccagactctgatgtgaccacggtaagtagaggcacagcaagtgccaggcaaccttgccatggtgggtgaattcccccatgattcccctggcctgccagagacttggtgtttcattccaagctggttcatgccctttaccactgaggcactgccgtccttggcctggctagttctgtcccacgtcatcctcccagggctacctcagcatggggttgaggcttaccccaggaattctctggcagaggatgcctggtgttcgccccacatcctgtgtgcacctgctatgtccaggatatgacttaaaacagggataggaaacacaccagagacgctgggccccaggctggaagctggcttgcaagagcaggagaggcctgtggcccacttgctctacccaattctcagattcacatttgtatgcctgtcctcccctaacctttgaactccatttagccctatcggggaaaggtagtccccacatgtctaaccaacggccaccggacactcctgtgttggacacgaactctgacagctctcagtagtcctgttgactgagtgcctgatctgtccgtcctacacttccccaggaatgcctcgtgaaatctctctttctcaggatacctccccccacccccgacagcaggactcagagctcaaggccccagaaccagagagaggtagtgtggggccttgtactcaggtctgcaggcttttcagtaaggatttagagcccacctgacccagcccttgtccctctgtagactcgcgggatacctggcagagccctaggctctgaagaactggagaatcctatagattggggcaggttcagtggctttgcatcaggctctgagaacctgctccacccacacctggtacctaacctcagggttctcacgcagcactgccgtgagatcctgaaagagatgggctctatctggaccagatagggagagtagaaaccgggaaggaaggaaggaaggaaggaaggaaggaaggaaggaaggaaggaaggaaggaaggaaggaaggaaggaaggggaaggaaggaaggaaggaaggaaggaaggggaaggaaggaaggaaggaaggaaggaaggaaggaaggaaggaaggaaggaaggaagggggaggggggaggnnnnnnnnnnnnnnnnnnnntcgaaacagtaacccgctgcataggccgtcgccctggtcggattttttaaaatcagaataccatgggacgctgggtcaaggccctgggaaagacctccagtttgagacttagcaaaagggaccaacaggcataacagagggaaggaaaggagggacagggaagacaaacactgaaacactaacggatatgacaatcgcactacacatggccgccgcgcccaccacacttggtacaccactgcgaaacacatccgttcaccgttcgaactacacggctattaaaggaaacagtcaatacaaacctcttcactgttgcaccgactaacagggaaaaagtatactacggaacagttggattaaatggcaccgaaattttcccgatcgcagcattatggggcagcaaccgatacgttatggtgcagctcgcttgagaacgagggagggagggactgagagggaagggggtgtggttatccagtgcttccacgtgttcaagatctgagtggtcctcagcagttcatcctgtccccttcctgagaatcccaagcagcaagacagggcggatgatctagaatgcatgggttttcaaaactgggggctataattagaagtctctagctgaggttcttacaggggttctctaaggcactggtcccacagcactctctgctgccaccttgtgggcaccctggtgcaggctcaaaataatctccaggttcccaacttgggatcccaagagtggctctggaatgcccacctctgaaccacccatctgtcactatgtttctggaaaattcctctcacgagaaattgagagccaagtgatggaggtcctctatagggggctaggggtgctctctagactgcagaagccttcagccaccaggggctttgtgctagaactttgtgtggaggctctgcctccagaggggcctcatgtcatgctctccccagactcaccactggctcccgtcttatccagcataaaagccggagtcagggtggaaagatggctcagtggtgagagtgtctgctcacaacacttcatattcatattggttgggactggccctaacctaccttcccattcctaccacacacgtacgcgcatacaggtgctcacatatgtgttaacaaaaacacatctacattcacatctatcctatatcccatgcacctgaaacacacatatattaacacatattcccagtactcatagaaagctggtcagggctttgtacccaagtatctatatccccagcacaatgactggcaggcacgggattgctggagcttgctggccaccagcctagctcccgcttcagcaaaaaccctgtcttagggaaatgtgtcagagcgtggtagagaaggacaactatcctgcacacacacatacatgcgcacacacacaagcacatgcatacacacacacatgcacccatacatgcatgcacacacacacactgatagcctacaggacccatctatcgttaccttgagcagctatgtaggcctcaggcaacatggcagacacagggctacagtcctgagtgtctcaggaagaagacagcaaaatcaaaattaaaagtgtgttatattaagcaactggcaaatgtaatatgcagctttggtatcgggaaatgtagagtttgtagatgtttaattacacagaaaggcaaattctaggttagattctctagatgtaagaatgctccagaacttggtagaactccaggttgcatgtgataagtgccaagaaaccaagtggcttactcattaattaagttggttacagaaaagtcatttcaagatgaatcaccatagaaatgctttaagtttcataacccctgaaacactgtgagcatattgtaatgcctttgacaaggccccggggcctggggtctccctgcagcccaggtgaggcagggctgtggttaggcacaggaaaggcagctgtaacagagagtggttagtgaagagccaaggaataataagaaagcaatgctggctgggactggcctgcctcgtgacctaccttcccacacctaccacatgcctacacatacatgaactcccatatgtgttaacaaaaatacatctacatatatatctatcctacaatgtcattcacatgcatgcacatatagtaacacatatatacacatatgcgcatgcatgcacatgcgcacacacacactcacacactgacctttccattgcttgcacactcacctctccctgactgaatactgacgcatcccccacaagaactctgtttcctgacctccaccacacctgctccctccatcctaacttaacatgccacctctgagtagctcactgtcctctgccacctcatactgtctcctgagaaattccacagtccgggcttatctgttaaattacctacatataaggaagaagttagcttagtggataaataggcagcctctggcatcaaaggacctgcgttctaattccagtgacaccagtcatcagctctgtggccttaggcaggttactgaccctctctgtgttccctcccactccctagaaaatggggctggtaagagtctccagttgagactgctgtggtcagatcttgcaggtatatgtgtgtgctgtgctgtgtatatgtgtaagatatgaccacctcagctgtcaaaccttgcgctccaccttgcttgggtcagagtctcctgccgttcatcaccccgttctccagacttatctggcccaagagattctaggggttcgtctgcctctgcctgcatcctgccccaagggtctggcatcacgtgccggtgctgtgtgcttttgcttctggtgtttatgtgggttctgaggatttgaacttgggtcactgggtttgggtggcaactgttttgcccaccaggccatcaccccaggtccctgtgttgggttttgattggtcgaaatgccaaaagcactgagacctggcagccgccgccaccagcagtctgtctgtctggttcactgtggagtgacagcctggcacaccccagctgagcaatatctctccagtgctcagtgtttacggctgtgttcagctgctgggatggtaagcttagccccatctccactcagcctctggctgtgtctgtactgtctcctccccaactggagaatctgttggtggcccaagggccacagtaacataagcaatagctgtgaccccagaagcccacagtgatggaaatccaggctttcccagagtctttggcagataagcctgcacccgtgtgtcccttcatccagtgccctttgagttggcagagcacatgtatcccggggcctcagtgtgtcggacatgtgggctccagaggtgtctaactgatgggcatacactgcaggccaaatgtctcccttgtctttctctctcttccctcaatgagcatggacccagctctccctgtttctcctgtggcctccttcaaggacctgctgatgggcattgatttagagcctttcaccgccctccagcaaaataaagaagagggagagggagagaattattccccgtcaggcgggagaaaaatgacgagcgtgaaatgggaaatagatgaggggagagtgtgagtctacaggcttgcccaggaggagccaccaggcagggtctcagcctctgtcttctcccaggccccctttccaccccatgaccaaaggccagcgcccactcactgctagagtatggggcagctctctggtgtcctgtgccgtaccgtttctctcactgtgaaattgacagcacgtgctgacctggcctaggttgttttggcttcgcatctcggtttccccatcccgaagaacagggatgaagagacatatcccttctgtaacggctgagacacagagactcaaggcacacttgctcccctcagtgacacgatgcagcctggcttgaattgcgcctgggatgaattgtctcctgttgtaaaatggggtggtgggggcccatcatagaagccaacatggtcacaatacagtgaagggatcaagggctggaaggtggggacccctctgtatccctcagcaaggctagggagaacataggataaggggatctggaatgagatgcctgtggtgaagggagcctcactggagagggacatgacctgtaagcctctctccctgcccccagaaccagagatgatgacaagtagaacccctggccacatgtcatatatctatctgttctggtctagtgaccccagagacacctcagctagggattaagccagagcggggacagattctgctgcaagcgcataaaagctcacaccaagtgagacgaaggagctgaccaaccctggctgtcattgccccttatcatgaagttaatgacattgtcctaatgcagcccctgagactgcagcccatcctctcctccctccccccgccccgcaccttcccctccatgatcccgtctacctgtgatgtcatcacattctacaacacagaggaatggtgggttgaggggtgaaaaccactgttgtctccagactctgggagactaccagagagggaacaggatcagcacaaggctagactaccagagagggaacaggatcagcataaggctaatgctgtgtgaccttgagcctgccccatgcgtctctgggctctgtttcctacctccccagagtgggtcgcagctaatgactccctgtccaggcattgctgtcacagagccccaatggcttttcaaatcctcaaccagaactgccagagggcgagataaaaggccttctgatacctgttcagattctacaacccagggctccccaaagctcagtagaggggcgggactcccagccttcccagctcccaagcctggaacttctgatcccttgcttctaacccccaagacctaagaaatcagcttgcaccaccaacatcggtttatgtagtactgaggatggagcccagggctgcatgcatgctagacaagtgctctaccaactgaaccccacccctagccaccctcctgatgcctacccatcacactgttttacatgaggcagccacacttgagtaagaaagggacttccctgtagacagcggatcagtgcagatgtcagagaacccagactttagtactggtgtattccatggcccacccacttcctgctcctaacagaaactgatgcctgttcctgcatctgcaattgggtctggaccagggactgccatgtccctcagtaagaggtctcttcctttctgggcaggtggtagctgtggacccagatctgggggagaatggcaccctggtgtacagcatccatccccccaacaagttctatagtctgaacagcaccacaggcaagatccgtaccacccacgtcatgctggaccgcgagaaccctgaccctgtggaagcggagctcatgcgaaagatcattgtctctgtcacagactgtacggactcccgcatccatccctgggcttccacataggcagaggctcttgacctttggggatgaccctgtgggtggtccttaggggtcctggagcctgctcgggaagggcatctccctactaagaatagattggtgtctacatcccagatgtgactgtccccagggcaccctatggcagggaggaactgggaagagacccatgacttaagcccccctcctcacaggacactgggggagtaggatggggggtctgtatatctctccctttctccatcactttcctctgatactcagtctcccatctctgcccccttcttccttgacctttcaggcggcagaccccctctgaaggccaccagcagtgccacggtctttgtgaacctcttggatctcaatgacaatgaccccaccttccggaacctgccttttgtggctgagattcttgagggcacccctgcaggggtctctgtctaccaggtaagtgtgggactcactttgccttgtccctgtgggccaagggggatctctgtgtgcctcactctaagcattttcatgagggctagggatgccagttaagacccccaacagcatgtaagccaagtagcctgggacaactggtgctgagagacttacagtggctgaggaagtctgggaggcccctagggacagacacttgagccgagtctggaaacactgaaagatttggagagataggatcagtcagaaacagaaatgaagaacatggacagaattctgggaagctaactccggaagtttcccccattcttggggggggggtcatctagcccaacgtgccaacctcgaaagctgtaaatagttctagaacaaaatgtcagacacctgtggctcagcacccctgtgagccctcaagcaactgtgtgaagagactttcaaaccccctaaggcccagaagaggcagggcttctctcccagggcccattgcccttctagactgggaagccttgaaggtgttgattcagagaacatgatgtcctaccaggagcaccttaggaactctgggagactttcaaggttgagattgtggacttttgagctggggccaggggagatcgatgcaaagagtgtattcctaacatgaaaaaggccctgagttccaaaccccaccacctcaaaaagagaagcattggagtccaaccattatccatgtacatcccaatcctaccacacttgctgtgtgacccagagtacactcctcaaactctctgagcctcagcttcctcacttgagaactggaaatggcggtagtggctgcctgcctgggctgacgagatgcagccagatgatagcggggaacacagggtcgctgtggagttaggtgtgtgtcgcatggtttatacatgagacagaggggtcccttgtccctgctccaagagtacagggctgtttctcaggacaccagagtacatgaccttggctggacaccctggctccttcttttcctgtatgaaaaggttgacccctgaaaattggggatgttctcctgagcccccagcaggtggagcctccgcctcgaacacagcggccagtccccaaggagaaattcccaaaggatgtgggagcaagagggtaaccgatctctgggggcctcagagacaggagagaaagagagacctggctcagcactacaaggaagagctatgagagctgggaaatatgtgctccatgccccagagccccacccaggcttcaaccaagagagatctctgctggacatgtagaagaactttcttcagggattagggtggcaaattaagtcagagtgccgagctgcagccctggaaggcatctgagaagcatggagagagcttagagtctctgcacttaaacgaggcttgatgtcttccaatggcaaaagtcttgcttaacccacaacgctcttgccctcactgtggttttacgcctccctccaagttctcaggtgtgagcctgtgaaactctctgtgtactgagtcctgctctggggagcttctgaccagggctgcaattgtgggacccggggaggagctttatctgactttatcccaaacgaaatcttcccaaggcattaaagagtagcactgatacctttttacgtacgtctctattttaactcataacgcagagaggagagtcggttctgaaggctgcaaagccacggcccgggagatgaaagggtccttaggctaagtggtactcccagccggcatcctaagggctggagaagacgggaaggttctgagccctggcaaaatataggagcccagggcttactggaggctggaagagcttaccaagaggataccagggattgaaggggaagactgtgcggacctgaatccggtcctagcaagtccttctcacccccggtctcactcagtccatttagactagagatcacctgagaggctcccagctctgataccctactaagtgtgggctgtcctggggacagtagccaggcctgaggctcggcttgcagggagcaggggtgtccgatgcaccaagctctggttagtagggagggagaggccactcccaggaaggaagtgcctgtcccaatgcctgccccctcaccagtctctgctttcccccaggtggtggccatcgatctggacgagggcctgaatggactggtgtcctaccgcatgcaggtgggcatgccccgcatggactttgtcatcaacagcaccagcggtgtggtcacgacgacagccgaactggaccgggagcgcatcgccgagtaccagctgcgggtggtggccagcgatgctggcacacctaccaagagctccaccagcaccctcaccgtccgaggtgaggggcgactcctgctaggaactgggtctgggacggtgtcactgaccggccatatagcagccattgggctccctctccagtgggaagccccacagtccagtcctgactgtccctaatatgttcaaaatggtccctgagcttggtccacacctgagcactgctttcaagcccagagccccaccaaggctcttctccctcctaagctcccatcacaggagctacaaagagggtcagagctgatgctgttctaagcaagcctgtcatcttaggaaagccagtgcttattcagatgtaaagaagaccccctgttctatgggtgtggaatcatagggcttcctatggaagggtatggatgtgatgggtatggataggaagggtatagggagagggtcgctaggagcctccactcccagattcttcaccccttggggccaaatgccattatgcccacctgcatgatgaaatacaatttcccatctgtatgggttttagctctgagaaagatggagacgttgacagtgtgtggatggaggcaggaacgagcctgaggacatacgtgcagggcttaacctggcatggccgccctggctctctatccagagggtgcatggaaagagaccagcagtgagcctaacacagacacacagcctggtcctcctcagtcgagacctggcatagcaagggtctcagagccagctgtcctctctcctatggatacaagacccccttattgatggcaggagccagtttgggggcctacttcatcaccaaataatcagtatgaggtgacttcctcttcaaagaggaccctcaaagaacctcttccaagctcagcaaaaaccatagatagtaacaatggcctgtcacctctcccagcgataccaacagagagcaggggaggccatgtcacttgtaagggtcaccctaagccccgtatacccaaggaggagtggccagctgtgaaggctggacacacaaatatttaagggaaattaagtttttagaaaggataaacttcagagccagcttcctaggatcccccaaatccctccctccatctatgatcgagttccccaagaccatgacccctccattgtattgctatgtgactgtagacaagttatccaactgctctgggcttctgtcctcccacctagagtgtggctggtaatgcccacctcagaacgatgctgggaggagaggcgtggctgtggactgtgtaagacagccacattgctgttgttgctattgttgttgttgttgttgttaagtgcctcctgggggtggggatgctctgtgctcctctcagtctgacagtcagggatagatagtgtggtagggggagtgctagctctggtcagtttgaacctagatgacttagccaccatacaggcctcctggactcataaccagacaacactgacacataagcccccctggagcccacaacccaccttggaaacccttgcagtatggccccagccatctacagcaggagccagggcctgggctagcgtgtcccttcaattttcagtgttggatgtgaacgatgagactcccaccttcttccctgccgtgtacaacgtgtccgtgtctgaggacgttccccgtgagttccgcgtggtctggctgaactgcacagacaatgacgtgggcctcaatgcggagctcagctacttcatcacaggtacggcccttgctgcctggcagggacctggaccagggggagggggtggcaatcagcctcaacttccttgcccccccccgcccccaagggcttgctgggagttttgaggctgaaggtgtgctgggcatgggcagaggggacagagtgttgcctggggcgtcccttcaccccacttcagaaggcagtcactacaggaatgtggcttcatccctcctcggggactcataaaatctgttggttgagatgggtttggtttgggctggaacatgttcaatagagttgtggctaaagctgataaggccctgtcctggctctctggagaaagtgaacctgccacggaggtagaccccgtgggaaaagacaaacatgctctatggttgtcacctcacgagctataaccgttttcctctttctttgatgcctgacccacctgacaggcactaggacacacatccctgtaaccctcccatacccaccttctttctgcttacgagccacctgaagccacgtcacactatactacatctatgtgtacatacctgtacacatatgcagcatacacactaccctccctgtcacctctcctcagcagcaagggatcccaggttctcccctcctttcctcttcactcccacctcctagcccaaagaccatcccaggaagccatagttggtgaggcacccacatgacatcaaccgagagcttctgccgctaacactaattgctctttatttcctgcctgccccatgcagaactgggttctgtctcttgcagaagacacattagactgggaggaaccttctgggtctttcctctcagaggcaagccatgtaaagagcacctgtaaagggactctacctgctcacctgccttgagcccttctagattgtcaatctctgtaaccagttgttccgagcacagtacaatggctccctctgctggctagagtgctgtactgcagcctgctcacacaggcggcgtctctccctctctggtctcagacagtcccttccctggctccacccaacaaggggaccgccactcaaggacaccaagcccacctgtctcctgtccacatgctcctctatgccattctgaattcccgcctagagagctgtagtcctttcagcccctcactatccctaaagatgagggtcctgggaaattcacacttgtaccccagtcaggcctgagccatgtgtaaaatgtcccttacccaggtcagctgttcagcctcctctgggagagatgctagggcaacatgggcaggacccacgctccaaagtgaacatacaggaggagcacaggacaggatacagaactgcagatcaagtggaggttaaaggaactagtccataattggagtgcctggcacacagtaggtgctcatacaagctgcaccctctacctgtaagagcatcctctgagggatcctgtgcaggttcccactcaggaggagagtcatggtgcgtcactttgtagaactctgctgaacaacccaagtcttccttctcttctgcctgcagcgggaaacgtggatgggaagtttagtgtgggctaccgtgatgccgtggtgagaaccgtagtcggcctggaccgtgagaccacggctgcgtacacactggtgctggaggccataggtgagtgctagctgtcgtgcacactgcccacatggctgttccaggcagagtttaccctggggagcccggcttagagtcaaccctctgccccgaggctagtgaagaaaggcccccacactcacagggcactgtggggtgagtgactacccctcagtggctatcatgtgctcccaactataaagaagggtaaagccacatgcaggccaataagtagactcatggccactctgctggaaagaaaaaatgtcttcatcagaaggtggccaggaggagactggattccatgccctgggcagagctacagacaccccgaaccccacccccagcctctgggaagaactcttccttgctcctccaggtcccgtggccttggggttccttggctcatgccccacccctcacctgaccttctctttgctggtggttggtttttgagacaagcaatactcaaataactggtctctaataatcctcctgccttggctttccttgaggagctacaggcacgcactgtgatcagagtacagaaccttctaagtcactgaatcactggttaaatggctagggggactgacctcccttcaagatcttcaacttaattatgtctccataggccccttttatgaaatgaatagtgtgcctaggctctgaggatctgaccgttcatcccaccttctttagtgccctgcttagctcagctgtgcattgggatggagaatcctgcctgcttccctagcttgttgtgaagactgaatgagccagacaaggctctccctgggatgtggcattatgtcagccccaggatatcgttagtggtgttgatggtccagaagggcagtgagccaccatcccttgaggcagatgaaggactgtgtaactctggctgatggcctggcatacagagcttctaataccttttcttcacccctcaccctccacagacaatggccctgtaggcaagaggcgcacgggtacagccaccgtgtttgtcacagttctggatgtgaatgacaaccggcccatctttctgcaaagcagctatgaggccagtgtccccgaagacatcccagaaggccacagcattgtgcaggtaggtggcaagctaggaccaggcagggctctgctcagccctgagagtattcatactcgatagcatcatactataaggggtggggacagcagggatccaagggtgggctggaagtggcttgtacttgaagaaaaatggtccctcctcccttctgagaagaatgggccacagtctgtgttagctgaggacagggccctggctcaccttggcgtcccccagagcctttcaaagcagtggagagaggaaagtagctgtttcctggaaaggaatcaaggagagagagcgcgagagccagggctcagcaaggccagaacagagctgctttcacggcttgttggccaggctcccctcttggaaggaagcaggcaaaaggaagagctccttggcccagtataggagccacagctaaaaggcccagagggaggaggaccctaaaaatgaagcacaccacacacacacacacacacacacacacacacacacacacacacggagagggaagggggctctcagttgctgggagggaagacagggaatgaatggcccatttcaccagcctcagtgttttgactcatcctaagggtaagccaactcagcaaagatgggcctgccactacggcctgttttctggctcagtgggaaaagaagagtaggaagtgggaatgtgtctacctccccgtgtgggcactgtcagttgtcaggagaggctcagaaagactctcaatagattccaggaagaccagaggcatccagcatctggctccaggagggaggaaatgggtcccttcctctggcctcagctaagaaagaattagagccccaccaccaccaccaccatgaggcaatagggccccacccttgcttagtacctgcaactctcagctcactgataggcaccccagaaactgcagcccacccaaactaaggacaacatagcaggtcataagggagcctcgttcctacattttagtctgagatgtttcagggagctgaagaaatgggggtggggggggcagggaattgtttaaagatggtttggagtggaagctgattttttttccccagccctgaaattctggtttctacatttgtaagacttgagtctgcatcctggagtccctgagtgacatgggctccccctacccacccctctgctctcctcacttctcagatgttcagcatctcaggacactttctcctaggccctagaagtatcctgcaaagatgcacccctccctttctgaggtctccaggacgcaggagcaaggcacagtgaccttacctctgtagcatgcttggagaaccaccttcctttaggctgtgggagcactggggcactgggagatcagtgtgggtgtgcgtcaagctgacagctgataaccttggtgagtggggtacagtgagcgctggcacaagatctggctccctgctgctcccgggctcatagggaagaaggcagatgagactgtgcatgctgcctgcctccctgatgcagattagacacaagagcaattctgggagagggggcagttctattggaaaacaaaggaggcttcgaactactggtactaataaagcataaacggtaagcagggaggacagtatcattcagctgcctgaagtgtctggtcaggacgagaggctcgaaatataaattgcagctagtggccagatgcacactgtagagtgggtacatccagtggacacagaggagacagtgacagctctggacaaagtaacagcaaaaccagagattagtccttgggaagacttaagtggcttaactagggtaggcagccttgtgatgggctcctggatcatttgactctgggacaggagctaagcatctcaggttccctctgcgccatcttcaagtctaagatgcagaaagccttggctggcatgagagggtgagagaaaggatccctagcagcccacaccacacgagtgggcctgctttgacctgttacttgatgaggttgttgccacaccacaaagagcacagctagtgccatccagccttgatcctccagccttgatcctgggaggtctggtccacgctatcttgagaggaggccacctctttcccaggaagacatggtaccactgccatgcatcctggggtgctttaggggtccaggtggcatcgcctctggtgctggcagtggctagcctcctaccatggtgatacagcctccacctagccttggacaacagcctagtgtttgtttgtctgatttgttttgatcttatctgcattgtgatttcacgtttagctcgggctgccttagataatcctcccacctcagcctgttgaatgctgggattgcaagtgtgagcttccacacttagcatacaggaaacatcttaatctgtcttcaggtcttcccaggctgtcctgacagatgccactaaaggatgctcatggtctgattcttaccagtgccctagctggcaatgaataagacccaccagaaggggcaggaaacagatccctggagtccctttccttgggttagccagatgcagggatgcaagcaccccacttagcgaagatacctggaccttttagcagctggtttaagctgaatcttcagaagataaacaaggcttctgggggaccatagggtgctattcctaggattagtagatacctagcttccaaaacaggtgctccagtgcctcaagttacacctcagagccccagagtaaaggtctagaggcctttgggtattcatcttttgattcaatggtctgttaacaagcagaattaggggccttcagagtcttctgggaaaggacatagactaaacacacaggaaaatactggggtgctttaggggtccagagtactggtaccactgtcctatggcctgggatgtcaggttccatcagagacagaatggtctcgggtgagcctgtgtgtggacaggcactgtgtcacatcatggtggcttcagtccagtcatagtcacctcggtggtcatcagagtccggcagaggacaccgctggatagcaggcctgcctcgtcggaagctgtgcagagagcgtcgcagcgagcccaggcgcttccagagccggagcctgggctcactggggctcactgggtgatgtggcatgcattcccgggcccctcggcggccagggtccagggcagttggcttacacagcatcatgaacagcaggcaagaggccagaagcagaaaaatgcaggccagggcgatgaggatcggtacagggtcagcagcctgggtggaagtcccagaagcggcaggggtcgtaaggaaggttggagggctaaggaggctggagccctctgtgttcatggtgcctacaagggcaggacagagaatcagagcagagaagctgcatcccagacagggacaagtgagacttacctggagcaagccaatggggggcaaaacttctactttccatggaccatcagcctaggctgttgggggagccagcgcccctctcggagctgcccatcacacactacccacaccaaggctcacctgctaactgtccaatttagctccatcctctgtctacgcagaccatctgtggcattccctgtgcgggatggatcctctgcagggatagtggaaatgtccagcagacaacagggctatggggcaggcttctgccttcactctgtcaactctttataggtttttattcccaggtgtgtctgagtggctcactgggctcagagaggactggaggctagaaggggggcagtagttaggcatgctcccttaatagcttgtcacaggttagcatagagaggcacagagaggaatcttatacatctgattagtgacagggctgggtatatacccgtggcttctctctgccatcccctacccctctgctatgaagaacatgggatatataaagctttctggcattttataatcagttctcagcaattaccagacagtcgtaaacttaaaagccctaagagtcagaaagccacttaatgaatcaggcgcaagtcagagtgtgagttgctctggtggactggcagggtcctagaagtagcccaaggtcaatatgagatttccaaaccaggggtagtggtgtgtgtcagtcatctcagtcctcggggacagggggtgggatcgggggataggagttcaagacaagctttagtggcatttgagaccagcctgagctacgtgagactcagagatggatggatggatggatggatggatggatggatggatggatggatggatggatgggtgggtgggtgggtggacagacagatggacggatggatgtacagacagacagataggtagatgatagagagatagagagagagagagagatagatagatagatagatagatagatagatagatagatagatagatagatagatagacaggtagacagatagacagacagatggatagatgggcagatagacagatagacagataaatagattgatgcatacatacatacatacatacatacatacatacatacatacatacatacatacatacatagattgatttccagatatctgcatgcctgtcttctcgtgacatgccagtttcattattggcttctctgatatccctcctttacatagggcactggccccagctggccacacacccccaggcccaccaaatacgtatttcacctgcctggatccaagggtacttcctgatgcagtctagcctgcctccaggaaactgaggaaaagcataagaggccaaacccatgctacatgggcaagcaaaggacaagaccgggtgtcccaattcccgtcccccttcaagcctccagccctctctgagcccattgagtcactcagacacacctgggaataaaacccataaagagttgacagagtgaaggcagaagcctgccccgtaaccctgttgtctgctgaacatttctgcacggggaatgccacagttggtcctcgtagacagaggaccaagctaaactggacagttagtaggtgagccttggtgtgggtagtgcgtgattgataggcagctccaagaggggcactggctcccccacagcctaggttgatggcccgtggggagcagaagttttgcccagacttctcaagcttctcctccaggcaggcaagctttttctttttttttttttttaaagacaaacattcctgccgtctcattggcaaccagtgcaacattgtttggagcacagaggagaaacagatattacaaaatgccaggcaaacttgattccaaaggtttcaaaatgaattttcaaatactggacctgaggcagggagagaagagcttccacttccccagctgattttgtatctccctcgggttctaacaccaaagccaggccacaggggaggctctatcccaacaaggccctccctgaaactgtgggaaatcggggagcatggccacccagtgcccccgctagcctcctaactcccttgaccaacctgggcactcaccagcaactccggggcctaagtcctggctcctgggcacagctgactgagggcatccagtgctctccacccacctgccacccagcccatgtcccaacccctcccagcccttgcagctgctccaggctggaaattctgatgcttgtctaactgctaagggcctccaccctccaggccttgggcctggaaagcactccaactgagtgggcagcatccatagatcagccctttcccggcatctgagttggagcacggatggcgtatacccactgccatccccgatggacagaaagtagctgcccccttggctctctatacttggccccagtaaggctagggtaattccagctaaggcctgcatcccaccagctcagaacccagagaagctgtgaggctacaggccccagggccacttctgcacagacgccagagacagtctagtggcaggctgtgacactagagagctggagaccaggcccaggagcttgaggcaagcccagccgcctaccagattccctgctgccagccagcaagaaccgtcggttccagagggaatactcctgaagaccaggcaaggagcccccttcctactggaaccttcctctgaaagcatctctctacatgctcttacttccttagaatcccacagagaaagtgtggccttagcttagccattcccctctcctggaccttatttcttttctcagagtaatagtcgggctccctgaatctgagcacaccttcacggcctcccaagttcccaataatggtctcccccacttcttacattggctttctctatagttctcagcattgacctctcggcctacccttggaggtctgtattctcagtggccaggtttcccagttgtcccaggagatccgaggtatgccagtggtccggctgtgatcctatgttgtgcagcagagcctgcagcagactgcctttcctcctgctttttctcctgggcctggttttgttgggagagtcctggcctgtcttggggaggggacaagtgggagtgtagaagtagcaactgagtgggaaagaaagagagagaggccttcgcctggctcactccagcctgtcgccttggaaccctctcatgtgcggaaacactggtcagggcaggggcaggtttaactgcctcttggcctggggctcccatcaccaccccccttgggaatttgaatggtatggtcgactattcagtgcctgccagccatcaggttaccagggagagggtctgtaagcagagagacacggggtggtgggccctgaaacccgcaagacctcctctgcagggtccctaggccctgtttttcctggattctcggaaaatgtcccttatctggctgcagaagtgtgtgccatttctcaaatttcaacatgtctcagactgagagacagggcattcacagtgtgagtggggtaccaggttcactccaaccctcacccacaaccctcccttcttcccagaataccaaactcccctggcaaccagctgcctgcttaggagcctaaatattgtgtggcttgcccatcagggactctacggtctcagaatacaccatgatggtaagcacaagcacgtctaagacctatctatggccttcaccacaaaatagagccttgtctcccaaccccggagtgggccaaagctttcctgtgtactgctaaacatggagggagccttggtgatccagcaccatccctcccaacaggtgacaaggctgagctccaggtaggcatagactgcccagagttatcctacaagtcagtgctgggtaggaacccggtgtttcttagttaaaggacaggatcccagcacttgggaggcagaagcaggcagatttctgagttcgaggccagtctggtctacagagtgagttccaggacagccagagctacacagagaaatcctgtctcgaaaaaacaaaacaaacaaacaaacaaaaaggacaggatctcttgccttaggcaagtgggggcagggcagtctttctgctgacttgatcgatgcaagcaggatttctcttccgacttttcccccaaaagagtgtgtccagtaagtgaaaataaggaaatttgtattagaactttgagtggcatgtcacaaaaacctgatttgatcaccatggcaaagagagagaccagtgccagagcagttgtgggatgactcacaggatcaaggggaaataaaaatggggaaacagctgggctcgcagaagatctgaaggtttcgatgctgtatgttgcacgcgtcttttatcggtgcttgctgagggtcaactcagtccctcaccagagactggccacttagtcatttacatctccattcagcaaatatattaaaagccaggtgtggtgatgacctcctgtaatccagcacttgggacctagaggccggaagatcaagagttcaagtccagcctggactttttgaactctaatctcaaaacaacaacacaaaagcaaacaaccctgctatgtgccagagagtagtaacatggcattgcacaaagcccttcctcagtgtggggtcagtagagggagacaagaacaaacatattcactcaaggaagaacagtggcctcagaccaaagaagtgatttacccaagcctatcaaggttaaccaatggctttgttagagttacatacaggattcaaaaataaataactcaaaaacatgtgcatcatcaaaaggctcaccccagcatgggtcacgactacagaagatgtagtttcctgccggattttctagcaactccacccaagagtcttttcagtaattactgtccactgggggggaaaaatcctgcccggagctgacagcagcaatagatattaatctatataatataaatgcatggaggttatttgacaggcacatcacatctgctaaacagaacaaccactatgaccttgctactgggggctatgacctccacagccacaaagttttgccctaattcacagtaccaaatatgagttctgccccatgaagtgagccttaaatccaatagaaaatcacctttaacagctaaaccactattgtaacagagggcacattttgcaaagtgtatatatgtatagagacatacatacagtccactattatactagagaggacgtttgtgcctggtatgtagtccatatagggtccgtaacagaataagattgtgacacttcttccttaatcgcctgcacagtgccttcctgacctatacagccagccagcaaggagggagctcctggctcagttctaggttgctttcttcaacaaaagaatataacgtcttcagcaataagactttaccatctaatattggcacacaaccagtagcagtcacaatggcccatttgatgtgggggtcccacagggcctccctggccagcagcctatccaaccctgggataattaattagttcatagttgtacggcttctgggcatgcccttttgtaccgacacggtatgcctttcttcagactcctgttactgttattccagaggctttttcaaatctgtaaaacactcgggattggctttatgcagtgaaacgtttccgcagaggatggccatgatctctgaacgcccatcttattctgcaagcagcagtgctgcaagcaagtgtcggtgtttgtgtggttcagcggctagggggacacccaaagaaactagcaagatccggtgacacgtggtaggatcttgccaccgtgtcactgacgttctcaaagcaaacaagcaagcagacaacaatccaaagagcagtactgggcaccacatcatggttaggggctctaccacatctgacccccgagaatacacaatcattctctactaactgccctctgtcctcatcctgggcccccccccatggggctgccatgtgcttccctgcccagcacgggttaggtggggctagcttgtgactctcgactggactggtagttacgtgtgagtgttacaacattgtcattgcccacgctaaaggacagactctctggctctggtaggttctgtaccatggtcattagccatcggccacaactgattactgaaaaggtccccatctgggtgaagtttttgatacagattctcattctggagtccaggttagaccttgcagagcgtcctagctttaaaattgtgaccgtcctcctgattgtgtgtactacacaggaacggcaggtgtatgtccccgctccagcctgctgtcccttcttgaaagggggacgagtacagcttattctgaaaggatcattgcccacccattgcatgtttttatctgtctctcctactccaccctgtcacttcctcctctctcctctcccataaatccttccagaagctctcgggcatagtgtctgcccttccagccatatttcccctagtgcatttggctcaacgcaaatcttaccacatttgcttttcagtggcctggatctttcggtgaccttttactctgacccctcacccatcccctcatcttggggttatcaccttacaaaaccagtttccatgttggtcagaatcagtggttctcaacctgtgtgtcacgaccccttgagggggcatctaacgacctttccacaggggtcacctaaggccatcggaaaacacagatatctgtattatgatggtcataacagtaccaaaattgcagttatgaagcagcaacaaaaatagttttatgattggggctcaccacaacgtgaagaattgtgttaaagggacacagcgttgcgcagccactggtataaatggttgggactcaccagagcccttcctactttgtaaaggtcacatcccaccaaggagctcggcaaagccacccaagccccacagccatcccttggtgaatcaactccttttgtaactctccggtaaacacagtactcaaagccacaaactggctattagtcaccacctcccatatacccagttcccacagcaatacttgtcactcctccttgaccccccagtccctgctagccacgaagaccttagtcagatgtaacccagtgtccctattggcttataccagccagtccatcagggacttgcttctctcctattggctcagctcgtgccacctcagctcaaggcagaatggctggctacatcactagtttcttattcgactgcccagctcagactgcccccatccttctctgtcccaatggcctcacaaggcagcctgggagaggctcttttattccttgtttcaaagtctttcccctgaggcttgagagatggcagggtagctgagcacttgcctctcttccaggggccctccgttgtttcctagtccccatatatggtcactcccagggatctaacattctcttcttctggcctctgcaggcacccacatactcatggcatatctgcacacatatgtgcaaaaataataaatttcttccaactccatcagttagagaccaaggcgtccctgattgtcattgtttattgtactgggccgtagttaaggtctcggcctgcatcctgaatcatagattccccccttttctctgtattaaagattgatatcccactcctccttacccttccattctttccatgggttccaagccattgcctcccaggaaaccgatttatctcggctctaacttgcattctctctccctggcgtctggccagctataggaagcagccagataactcctccatctcccttttcagcatttcttctgccaagccaaaggctgtcatgagggatggcatccgtgtgccactttcctgtagtaattcttcccttgcaatggccagttctttctgggttgctgagcctcggttgcacatcatcacccacagcagaggccatgcagctgctgcagtgactgtgtctagtgcacccttcggagggagcagcctcagatagacatcgtatcacccacagcagatgcgttttgctggttccgctcgggtgctatcttagttgcattcccattgctgtaataaatgtcctaacttaagcatcttaagggtaaaggacgcattttggttcatggtttcattggaataccagtccatcctggcagaaggcaggaaggatgtagtgtaaggttgcctggtcatattgcatctataatggggacatgtgggacagggggtaccatggaaccaggaggagctggtccagagctggagtggtgtccagccccataaatctcgtcttgagagccattggagtgaaggccactctctcacctaccccaagcctgcatgtccaggaacgcgtagtcctgtgccccacacctttgtcccaaccagaggaggtcccataaccagccaggttaaacttcctctctccttataaggttcatgtccagcattgactggaattcctcattatgcaaatgaagcattcccagcaccttagcctcagccaataaaagcctctatccactccccaaaggtttaaatagcctttattctccccaattaaacaaactgctcaatggagcctgcgtctcacagcgtttactggttgcctgaggtctccatcactcctggcctttcttgactcccccttcctcccctcagaatccccatccataaaagcaaagggtgaatgggaagtagaggcaggcaataaggcctgaagtccagtcctcagtgacccacatcttccagggtgaggcactgcctcctaaaggctccacaaccttcccaaagagggtcaccatgtaggggccaagccctgtgagtatatacagtgtataagacacaccaggaccacctgcagggagttagagctttacttggggtgattcaatacttctatagcgttggagaatttggagtagaaacatccaggatgggcaaaggtcattggctgagggcttagggttcagaaatgcctcattagcatggggaagcatttcaggaatcttgggtgctaactgaatgggttctgatcaggagaaagggtgttgaacctgactaaggctgtgtgacattctgcaggtagagttaatgaggggcagggggttgaattcctggggcagggtcagagaaggggaagctctgcccatgaagggagtcctccatattacaggggtccgagccccagaaggctatcagtcaacggtagggtagactccagccttagtaagtcaacagggaagcattccacatccaaatcacaataggtaccaattctgttgcaaagttttcctcggggtggcatataccaacagctcctcaccccatccagggcactaatgacaaaaacaaacgattccacccagtgctaccttggcaaaccagtaagtttataggagcgtaggttacttatggatcatggggaactcctcggcagaactgtctgcaagttgaccaggaagctccagggacacaacttttaaacattttcactcaggctagagtaggcttttcagtgatgcggcggctgcttcagagtcaccctcatgttgatcctaagacatcaagagcctcactggtaggaggtcctagaggtgtggagtggcctcgttcagcctaggccagatagtaatgacgtaatgtcccgcatggacttcctgtctctcatgagaaagggataggggtaggtggtcctggatggggccacatagaccacatcagtgataggatggtggggtgtccttgtggacaacaaaagggatgcacatacatgcctggggtcaggtatggggactgcaaaaaacagctcccctccgtgtgttggggttaggaataactccactgtctcttctccttcagctgaaagccacggatgcagacgagggcgagtttgggcgcgtctggtaccgcatcctccacggtaagtcggttgctgcgggataggaaggatggccgctgccctgtggagacacttctttttgtctgagcagatcagatgcccaagcaccatatacacaggctgcaactcagagagagagtggggcccctgactgtttacactaagttgaatgtattctaagcaaagaatggtatgctggccttgtacctaagggctccacatgctacagcattcccaaagctgacaccgtgaaagagaaaaccttggaagtcagggcatcccctgggaaagtcactggtgagagtccccctagaaacacaagcccgcccctgagctgttcaccacagccagagcatgaaacgccactcacctgctggcttgcaggatcaggggtgcagccaccctgcatgaactccagggaccaagtgtgaataagtgtgtccccggagagaagtcaagatcatgggtaccaatccggcccagtcgggtccgctacatcctagattcactcaccgacagacactagggttctcctcaagcttccatatccccaatagaagtggaagtgtggagacagggttagaccttatgcttcatataaggaagaggccagtgagcttcagttccatgtcctcctctcttaggccattgtgggcgttaaccaaattcccaagtgaacggatggttttcagatggtgatacaaattaaaatcaaacatatttgagacacagaattgtaattctttcagttaggatagatgatagaatactttacccacatttccaaatgggtgttatatcataccttacaataccttacaatttacgcaattgttataattatgttcaatgtgtatctgagaggaaagagcctttttaattggacaaaaagggagaaatgtagctacttgtataaaggctatgtgtatatctttcacttgagaacataaaccattgagacaagtagcaacttcatgctgggatttattaattaataattaattcaatgcccaagtcctgtgggcaggaccaatgtgccatagggcctggaactcactgccttctatctcataagcatcctcttcccggtccagcccatgcatctcatgtgctgctccacaggtaaccatggcaacaacttccggatccacgtaggcagcgggctcctgatgcgagggccaaggcccctggacagggaacggaactcgtcccacgtactgatggtagaagcctacaaccatgacctggggcccatgcggagctctgtcagggtgagaacacaaactggggcctggtggggcaggtttcactactgactggcatgcagggcaaggaatttggtgaagagactaaaggcctagaccagccagggattttggatttgtcctttcactctgtgccatggtttcttgaggaaggggatccacgatactcatgtctgttctaagggaggaaagaggaattgtcactgatccattccttatagacacccagttctccacaacgaactgagagccctcctagacataagcttagaggagcaggtagcaatattgctttgcagatgaagaaatagagttacagagaagtaacttggcctcttgagcaagacttgagaccttctctaatggtcacacacagaggtctgcctcctgtctatgttgtttaatgttcaccccgcctcaccctccatacacatgtagcagcccataggccccttcccctaaagccataggaagtgagtcagaacccagaggttcctgtcatggaggaaggtgggagttcatcagacagggacacgtacccaggcctgagtgtggctgagtcagtggaacccatcagcccagagcaacccgctgtttgctgggactggaaacattgagcaggagatagctggtcagctgttgctcaagtccctccctccgggatgcttcccctcttgttaaagatggatgtctccaaccaaactctgggccccaggcagatctgtcagagctgggccagctctgagtttctagctccttgctctcagagaagatgggagagaaagttggctcccgacaagctacccccctcccccatcccttaagaagagaatgaatacctgtccaagtggatacagcagagggatcaagtcccttggacccttagaggacacgttgacagagatacagttttctgggtatgtaccaggaagtcgccacagtagcttcccattgtgacaggctcttattcacatgctaatgagcaccgtggggcctgcctgtgtctttcccctcagtaaactcacatctggtcacaagaatggctggtatcagtgaggttcaggctggacccctggacttcaggcatcctaaccacagccctctctgtgtcccatcccctcccctcccccacccacctgtttctcaagagcccgatcactctgctatgtgccatttttagccaccaaccttgttgttaaaccgagttctttgcaacatcccagggtgtaaaacagatcaaaggcagactgtgtacaaccttaaggtgaggcaccccagtcacagccttgggccccttttatatgctcctgccctcaagaccctgaggaaaaagaaatttgacccaattctgaggaaggccctgcgttacccccattctacagatgaggagactgaggcagagaggaatcaaccaacttgataagggtcccattatggtatgggtagagccaggcttcaccccaggcaggtggtccagactattctcttacctctacactatatgattcctggaccaccatgcccaaggagggttcttggcaccctgacaagcactacatacccaaagagtaactttaagaattcaggtgttgtcccctggcatggagattcgatggcccctgcagtttagagcatctgttctcctaagagagtcaggagagctggggcgctttctgatagcaatgtgaggatgctagttttgcccagtaagctgcaatttctactttaacagctagcaacagtccccatgaagtccaggaagtaaggagggaaaccttccttctggatgctgggcatctctgtgtgtacatgcccacatgcacagtgtatacacgcaactgccctcttatccctgttggagggtcgggcagccctgtgcagacactcgggacagaaggcattctggctctgaggcacctggcagcatcctcctgttcagcaagagttcagctggcctgtacttcctgttcagctgtgtctctcaggttcacaaaccacaccatctttcctcctctctctactgccgaaagcagccagaagtgttgaaagcctggccacattgtggcaagctacactccgcccctctcccgttcctcttacactatcagactgacagcttcttccccgatgtcccccagaaggcaaggtcattagaacaagcaaactccggaaagggaaggcttgccgttttaaaagatggatagttaatatctgtttacacagagttcccgaaattcacccatgccaattcccctcacagtcaccacacccaggatcttctgcaacaaactgtgggtgaagccaaatttagaaggctcccactacagctgcagactgaggtggaccctgtcgtttgcatagtagattctcgatgtccggacctgaaaggtgctggcgtgacagggctgtggaacctcagggcagtggagtggtgagctctctgtgagcctccctggccaccacatccatcttctcccctggctttgccactcttcccacccttagtcatccagtaaattccctgataacctagagggttgtgtgtgtgtgtgtggtatgtgtgtgtgtgtctaatgtgtctgtggtgtgtggtaggggggttgtatatgtagtatgtgtggtatgtgtgtgtggtgtgcatatgggggtgtttgtgtgtgttatatgtatatgtgtggtatatggtagtatttgtgtgttgtgtgtgtatatgtatatgtggtgtgtttgtgtgtgtctgtagtgtgtatggtgtatgtgtgtatatgtgcatggtatgtgtgtgtgtctagtgtgtctgtggtatgtggtatgtggtgagaggttctatatgtgttcatgtgtggtatgtgtgtgtaaatgtgtgtggtgtttatatgggaggggatttcnnnnnnnnnnnnnnnnnnnnnnnnnnnnnnnnnnnnnnnnnnnnnnnnnnnnnnnnnnnnnnnnnnnnnnnnnnnnnnnnnnnnnnnnnnnnnnnnnnnnnnnnnnnnnnnnnnnnnnnnnnnnnnnncatgcgcatgtgtgtgtaaccccagagacagctatggatataggcaaagtgccaaaggcaggttctctgaggctgtcttgccctccttcccctttctgtcctgtccttgccactgacagctgtgacctgtgctgtgcacactgagctaccccaccccacttcctcccttctccatcctgcttcatggtaatgcttccctggctctagggagccagaaggatgtcttatactggggccagctcatccccagcacgaagcctaagcatggatagatagggagccaggagacaccagccctccttgtccctgtgagatcttggggaaaattacttctcttttctgagactcttttcccagtctcttaaaggaggcagagcctggggtttctggtagcttgtgtgtcttttccctccattctggtcttccaggcaacaagattcaggtctacagcaaactctctgggtattcccatatatggggagaaaagaggggctctccttgtttgcagacacagctctccataaaaaccctttgaaccgtagcatttttctacatctgacacatgttctttaaagggaagtttcaaagatggagaaaagcaatgggaacatcacacacacacacacacacacacacacacacacacacacacacacacacacacaatcacacaattctagtagggtccccagaaagcaattccagggcaaggattgtcatgaaagtcattaataaggttccccaggaaagtgatagagggtgaccaggaaaccctgtgggttgggggattaccctctgtttcattgggagccctggaaggagtcggggatcagtgccccacccagttgtctgctatggtgcagtggcagtctttaaagggctgttgtgtgagggtcacagggtccaaagcacaaccacttctgttcttgttaccatcatggttttttgttgagtctctcctaaataaatgtattttggtctttgggtggaattagttttctactgatgaggcaaaatgccatgaccatgacaacttataaaagcaagcatttcatctaaaggctaatgattccaagaggctagaatctttgaacatcataattgggagtctggcagtaggcaggcatggcactagagcagaagctgatcagagaaagagagagagagagagagaaagaacacactagaacccccccccccccagtaacatacctccaacaaggccatacctcctaatccttcccaaacagttccaccaactggggactaagtattcaaatatacaaagcctatggaggctgttctcattcaaaccatcacactcactggtggtttgaatattttgtcttcctaaccacctcaggagcagtgtaacatgaaccattagtggcattactatttcattctggagaaacttgaccaccccaaaagtgccactggtagtcactggttcctacaggtcggtgcaggaccaaaaaggtttctgaacagcagccttaagccaggtcctgtgtgaggggccagattcaatgggagaataggcaagactaggccctccaaagggaacaggggccataaccctggcatgtctctgcaggtgatcgtgtatgtggaagatgtcaacgatgaggcccctgtattcacacagcagcagtacaaccgcctgggccttcgagagacagcaggcattggcacctcagtcatcgttgtccgagccactgacaaagacactggtaaggcagggggtggggggagtcagggatgccacttctcagagtgaccctcctatcgccaggggccctgccatacttagatcttccatgcagccaacacccaggctcaggagggcctccttgcttgccgttaactccatacagatgcccaggccccagaggattagtcagggaagtcatccaacctctgatggccagaagagagtgaaaatgtttgcacacccagatcagtcatcctgggatctagcagcacaatgctagccttttgcaaggacaggaaaagatcatggacccgtgtcataatgctagcctagacctaagcctccagtcagctgccaccttctactgcacaggggatgcccagagctcggtacttgcaagcctcctcacaacccatccttcccatagggaagtgacaggcttggaaggcagccccagcctggcagagatttccatagccacagtggtccatgtaaagtgaacggaataggattctgggataccacaggcttctctactgagcctgtgccggttaggagagggctcttccctaccacactggagcaggaatattttaataaatccaggcccggggttgctacccgcttcagtggtttatgttcccagatcaaagacagacagacggacacacacacacacacagccataagcagcacaatagcctccatgctgttagaatccactttcctaccaataaactccgagttactgcttactaatgtctgtgttccatcttggctgctcttgacccaatgaagaagccctctgagccgtgttctcttggtcctttgacatggcggctctccttctccctcctgcacggtcttctgccatggtggctcctctctcctgcatattctctcccttccatggtggcttcagcctctccttcctcgtccacgcctggatttattaaatattcctactataccacactgttctgaccttgctgccctggctgcagtcaacgccccccaatagtccctatgcaccctcagcatcagagattactggcctcccaggctgagtgacagagacatagactttaggattcatagttggttcattctctaaatggcacaccagcacagggtcaggggcactgtggattgccaaggcctcttctggcataggtaaccctttgaaaggcaggcgaaagtcgtggatgccttcaccaaggtgagtgggtttgtgcctgtctccttttctgccttcccaaactgcctgcctcatgcctgagcagtggtgtatagaagggatagggaactacttggccctgagattctcttccaccagagacctgaatgaaggcttggctgctctgaaggccctaggctttctaggtcaaatcgccactacaaggtttctgcttatccaagacaggtgtgcaaatgtaaaatttgaagctccaggagcagagccagctccctctggcagatctctagtgccagtaccaagctccggagtgggtcaatggtgttctggggtcctgccacccaccttgacctctgctatatcttttggggatagcgtatgctgaaggtgggaggagggaacagccaaggcctctcatgagcagcccctggaaaagagtgctgaagaagccatagggaagccctacctccatctgggattacatagttttcatcttctcgaaggggacggtggcctggtgaactaccgcatcctgtcgggcgcagagggcaagtttgagattgacgagagcacggggctcatcgtgacggttgactacctggactacgagaccaagaccagctacctgatgaatgtgtctgccacagacggcgcaccccccttcaaccagggcttctgcagcgtctacgtgacacttctcaatgagctggacgaggctgttcagttctccaatgcttcctacgaggcagtcatcatggagaatctggctctggggacagagatcgtgcgggtgcaagcctattctatcgataacctcaaccagattacctaccgcttcgacgcctataccagtgcccaggccaaagccctcttcaagatagatgctatcacggtaaggaggcgggtcatcacggcagggcttttccaacgcagcgtgtatttattgagccccttgatgtacagcattccttaagataactgttcttctggtgttatactgaaagccagtcagtctggtatttttgttataatggaacaatggaagttataatagaacaagctaaacgctttcccgttgtagtagtcaattaagcctgctcaaatcaccccagtgggcgcgcgcgcacgtgtgtgcacacacacacacacacagccttctattttaatatgtcttaaacagcccaatggcttagcactttcagacctccacgaggctagcagactctcccctctgatattcctgggctattacttattaaaacctatattccatccctgggtggacccaaacctacagccctgattnnnnnnnnnnnnnnnnnnnncgggtgcaagcctattctatcgataccctccaaccagattacctaccgctttcgacgcctaataccagtgcccaggccaaagccctcttcaagatagatgctatcacggtaaaggaggcgggtcatcacggcagggcttttccaacgcagcgtgtatttattgagccccttgatgtacagcattccttaagataactgttcttctggtgttatactgaaagccagtcagtctggtatttttgttataatggaacaatggaagttataatagaacaagctaaacgctttcccgttgtagtagtcaattaagcctgctcaaatcaccccagtgggcgcgcgcgcacgtgtgtgcacacacacacacacacagccttctattttaatatgtcttaaacagcccaatggcttagcactttcagacctccacgaggctagcagactctcccctctgatattcctgggctattacttattaaaacctatattccatcctggtggacccaaacctacagccctgattcttacaagttggctgtctctctgtctctttgtctctctgtctctgtgtcctacacttctgaggcctggtctttctcctttctaaaatcttattcctccttcggtccccttgcccacgaatcctcaagtcccgcctctgtctctctgccgagccattggccactagcaactttatttaccagtcaaaaccaactggggacagaggccctcagcgtctttcatgaagattcttgtgcaattttgagaacccagttaacataatacaagcgttagaccaaatccacagcacttgtccttctaagttcacactgccacaggctgcttctctgggttctggctgcccactgggtactgggagagttgggtcaagtctgaacagctccgtcgggtgggatctgtagggttcttgatggctgcttgtctgccctgcttcagattcgggtctccagctgtttaatgtgttccctgattaatccgcagtaaaagttcctgggatgcctcctgagcttcaggtagctggttacagactcttcagaaacattttacttgcttaccatggccaattccgaggctccttcaaaggagtcatgccccttccaggcacagcccagtcccctctgtaatcccagttcttaggacgctgaagcaagaggatctagatctccaaaccaacctaggttacatgccaagaccctgcctctaataaaataaaataaaataaaataaaataaaataaaataaaataaaataaactccatatattcattgttagtccagatgttctcccaatcacacaggtcgggggattttatggaggctccagtgtgaaaacacagtctattatgcaccgtctacgttcctttcctcttcccagatgctcccattaccaggaaattctaaggaatcgtgccttctgacatattttctagcctatctttatccaagtaatcttatttccctttttactctgtctgaatggaaactcaggtctagctctttcccatctcttccgtagctatactaagctaggtatctggtactactgctccttacccccagcccatctccctcgatttagtgggtcttcctctaggatcccttctttgatgatagtcaaggtatgaatcccaatctgatggaagggctgcaattgacagccagggcaatcatagcacagagggcagtattagcaactcccaggcctcctagaaagcagtcttcctgtgcacagacttcagcagtcaggccagccaccgccacatgcaggtcccaccttgtgaatcaagtagtatggctctgatctctgatgtctgcctgtgcactgcttgccctggcagggtggatgagaaccatgcctgcagtggaccaggccttgtcccgagggagactgggaatgtaggcagaccgagagctctggggcagaaaagctatgagtgtgagcatccagagaatatgcgggaacagtattctggtggggtgatgggaggtaggagacccttgtagaagagatggctggaatctggatgggccataagagcaatgggatttcagcctgtagactcatgggaaagttgtgtcaggacggtgctgtgaacatggctggcagagtggggtgaggggatggtaggctccagctggagcagagaatggctgcctgataattgtcatcctcacccctaccccataccccacagggtgtgatcacagtcaaaggcttggtcgacagagagaagggcgacttctacacattgacagtcgtggcagacgatggcggccccaaggtggactctactgtggtgagtgggtcctgggtggcagctccgcccccacccaatattccccagcacctgacccatgggcagtgggtggaaggtaccaggccagccagtaaccatctatatctgttttctctcccttcctgttcctgcccctgctcccgctgtgcctacagaaggtgagttagcccatgaactgcctcgtaccactggtggtgcacagaccttccctggagatagggcccacagggcagagggctgtccagttggtgcagagaagaaaggtgattgcgaccaagcctggtgaccttggtctggtccctgggacccacacggtagaagagaaccgactctaagtcatcctgtgaccttcacaagatgccatgccccgtgttcacgcttacccgcccccatccatactcacccagccaccccaacacacactaaaccaatcaacggtgtaaaaagaggggaaacataaacatttacagcagggcttcctctcagacctctgctgcccacccattctcctctcccaagctgtgtcctccatggtccatccattccctaaggaatcatgagacagaagtgcagtaataaagaaatacttggaacatacccagaaagagacctgagggctcctcagaggctgtgtgacaaagcaaagctacttagcctctctgtgtgcttcccctgccccccctaaagagagaatcctgccagcaaccttgccctcctcagaagggatggcagatctcaggaagagagacatggaaaggagggtattcagggccagcacccagggaggtcttggcatggtagctgtgtccacagggtgagccccactgccaagactgtgtgctcaggagtgtcagacagagcccccagaaggactgggcctgagggtggagttcagcaggttgggggtggggcagagcagaggtagggggtgtgaatggggctttgacccacacacacttagctttctttaactcctggggcagcagacaagtacaccacatcctaaatctcccagcaggaaacttagcagatatgggtagcagaccttagcatcttcctcggtatcgtgggcccccgctgcccttcggccctcggtggctgctgggtatcccatgagagcgtggtaccactctggcatccgggcaaccctttctgatgtggatgacaggaacttcagactctctcccccactcagctctcttccaagaagcaaaacctgtttcatgccccagatacccagcccagttggcccccgtgctgtttgagttgctacagtgcacgtacaaaaggcctttaaaggtggtacaatttcctttccagggccagtagccaaaccacagctcacctccacctgactccttcctgcttcagcaatggggtggggggaaaggccggaaggaagtctcagctataggagctcctgggttgtatactgggggatgggggatgggcagggaggtgaggttctgaggctgggagctggagaaggcctccatcctctcttcacctaccagagctggctcccttctccccccacacccctatcaccaccagaaagtagcaaccacagcaccaccattgactgactatgccaggcccagcctgtgctggctgggctcctgatgcagcagaaacccacagcagatttaaccctgcctgcaaggcaagagctagattcaggtggggaggggaccctatcacagcgtcactatgacataatgtcagggaacgctggggtgggcttgcctaaagtcactcaggctgaccaggggttaatgcagccaacagggaaaggtttgtttgtttgtttgtttgtttgtttgtttgtttgtttttctggcacagggaacagggtatacataggtcctgtggtgtgaggaccctaactgaccaaagaatttgaagggccagttacacacacacacacacacgcacacgcacgcacgcacgcacgcacgcacgcacgcatgcatgtacgcacacaggacagctcactctgtctggtttggctctgagcatggggtatactagctatcactgtttccatttcccatagcaacttgcttccttagcagactcagactacttattccctggtagataagtacaggcctatggagaaaggctgagtgtccatcagacaggaagaggaggggtaatggagattactatacaccacctgtacccgtgcttgctcatttcctgcttcctacatccagtgctcaagtcttcttggttcagaagttttccgctgagaaaatggaaaaccagagaggtcgagtaactatgtgtaaagtcacacagccagccatggaggaattgacacccctaccaccacccccagcttctgacatcagcctgatgcttggggggagagtcttggggggactgaaaccaggcaaggcagcctgatttgaggttgggcacagtggctttcttctgtaagatggaaagggtccctaaggaccatgagcactgtgcataccaaaaggctgtcagctatgggatccagaaatcacggccctcaaaaggatggtgaggactggcctggggtgagtagagcagcttgaagcagttcttaaaacccaggctacctcccaacctgcccctggcagtgaatgtagccgtgtgtgtagtctctatggcctatgatcttcctggggctggtggtcacacccacagtgacccttctctcttcccgttcctggtgctcttctccacccgagatccaggcctcagacttgaaagaaaatgctgtttcctggagtttccttccccaccgggtcacagtagcctcctgctcctggcctgatcctctctctttaatacagaactgtggacaagaaggctgaaatctggccagcagctgcttcaaccagccagcagcccaggattctcatttctgtgattcatcgtcttatttcatataagaatctgaactccttaatcatgctgaaaaacaggaagtgatgccagccagtgccagggggctattccaggccttcattcccatgagctggaacccagctgtccagctgtccctgtccctccctgtaccatattagacagtcttcactggcccctctctttgctgttctggccctgtgatacgtgtgcaacaccacacacacacacgcacgcacgcacacacacacacacacacacacacacacacacacggatattgctcagagaaggtgggatggagcttgggacttgaaggtttgctcaaggcccctgctgacctcatgacctaaggatattttggagaaggaggcaggaggtggctgagtgtgtctgcccccaggtctacatcaccgttctggatgagaatgataacagcccacgcttcgacttcacctcggactcagccatcagtgtgcctgaggactgtcctgtgggccagcgagtagccacagtcaaggcccgggaccctgatgctggcagcaatggacaggtaggcatcaagccagggtccacccaggctggagggtgtttcagagtcctcagggaccgtctgagccagcaagctttgtgttagcaagcgggaatggacatttacgtggggagactcaggctcactctctaggttccgaggctgctggctaacatccccaggactgggtacttgccaggtacatacggcctgatcccattccttggcattatctctttctcccaggaccccagaaggatagagtcatagcgagcatggaggcaaggcagccccatgaatctgaccagtcacctcctttccctgtaccctctctttccacaggtggtcttctccctggcctctggtaacattgctggggcctttgagattatcaccagcaatgactccattggtgaagtgtttgtggctaagcccctggacagggaagaactggaccactacatcctcaaggtgagcacccactggctctgcctacccttgccacaagagtcagaagagccaggcttgatggtacaggcacatgcctatcatccagacacttagaaggtgtcagaggccagagcagcagttcaaggtcattcttaactatatcttaaatttgagaccaccctgagctacatgagaccctgtctcaatatatatattcatacatacatacatacatacatacatacatacatacatacatacatacatacataaaataagaaatagccaatagaacaaatgcctagtggagctggtgggatgctgaccctgtcaggaacatagtaggtccttggacaaatcatttcttctgtttggctgggcctcagtttccccacatatgcaatggccaatagaaccccacctggcctgcttctgctgcacagtgaagtaccacgctgactacagtggctgctgaggtcttgggcctggcctgtgcaccatgaggttctaagcagcccacactgctcctcttcagaagccgagagcctagaggccaccaaggcaacgctgaactcccctacaaaccggctcagtgtgtcatcacgactccagagggttgcaaaagaatattccagaacccctctctgcttaccagagacccaaaggcttgaatcctatctcagacccaaggtcaaggtgaagcgctaacacaaccccaaacacagacaagtcaggaaaatgatgactgaatcagaagccaagtggatttgacaagatttaggcaagcattgtctgtagtacgggcagaaggggagaacttagtggtggacacaggacagggatggatcgctgagtctcttggctctaccaagtcctccctatcaagaggacggcctctgggccccataatcctgatcccatagttccttttcttcctcctcacaggtcgtggcttctgaccgtggcactcctccacggaagaaagaccacatcttacaggtgaccattctggatgtcaatgacaaccctccagttattgaaagcccctttggatacaacgtcagtgtgaatgaggtaaagaccccagattaccagcagctgaccaccatccagggtggaccatggtcagaagttacccatgaaagagccattcaaatgtcttgttggcccactggtccctcagtcctcagaatagggatcctgaatagatacagccctagtacccagcatggtagtatatttttgtggttaaaacagagatcccgggacagcttcttttttaaaacaaatgtatttggtacctggcgttaaggctgggcgagttcatgacatctttttctgagccttgcccgggcattgtgccagaggctgcttatgttttaggcacccctcccgggtcctccctatgaaggggacagcctctgggctctgtaatcctgaccccatagttagattcctacaatagcttctgattggctgtatgggtatgtatgtatccttcttcagttttcatatataagtgtgagcatccaatctgaactcacaggtttggaccagaatcaagggactcacccaggccctcttatgtaggaggtatccaaagcgtgttgtctatcaatatcctgatcaccctcatcggtgccccagaggacacaaagcaggggcccagtgaaacctcggggcaccaggaacagagctaggcttttccctgactgtgggcctgagataaccacttcctgctctcctgccagaatgtgggtggaggcacctcagtggtccaagtgagagccaccgaccgtgacatcgggatcaacagtgtcctgtcctattacatcaccgagggcaacgaggacatgactttccgtatggaccgtatcagcggtgagattgctacacggcctgctccacccgaccgtgagcgccagaacttctaccatctggtggtcaccgtggaagatgagggcacccccacactgtcggtgagcaacggaggtggatgggatggctctgtcccctgtgtgtgagaagccagtgatggggctggagcctgtcatagccctcaaactattgatactcttaggttgtatgccttaagttcacaggccaggggcctcacagcacaggtatgtgccaagcgggagactggttctctctagtctgtactgttctgagtctcattaatggatgctatcagatgagctcgacaccaggccatggccatgtatgtaaagcaggatgtatgaccaaactgggcactgcagggtcacattcaaccataaggcaatgcagcctctgctcctcaccctccaccgtgttggcacaacactgtcaccaacacaggaggtgggaggggctgatggctgtagtcctgtgtgggtatgcatgtatccaatgtatgcatggtgaacacagccacatcccatggttgtgtgatgcccatgagatattcgagctagggaaggaggtgtggcttgcagactggatagagactgtgcactccaagaagagtgctctaagatttggaaccttccaagccggccaatcagagcctgccagaatctcaccttcaagggatgcagatgtagactgggctccgccagccatttctggtctcatctggggcccctgccctgtacatgctgctgtcatgtcagctgagcaggctgcacttctggcagttagctggtatcccttgaaggtgacagtgacagctcctccagctagcaagcctatgcctgagagagcacaagatacacatgaggcccagtggttgtcaggcttgggctggcacagggtcccttctgtggctttctcttggctaaagcaagtcacaagccattatggatagagtgtaccctcaatgaaggtaaagactggatacatttatgctcagttgctctctgcccccaagaggtgtcttttggggatcagccatgtcagtggccccacaggacgaccaggtccaggctggcattcatctggagtaatgctgacaaagggttaggaaatgggcggacagtcccagaaacacacttcacatttcgaaatgggaaacaagacccacactgccctgcctcctaacgagcatcctcattcccagggcagcccggtgactttgctagctcagccagcgggccaattaggacatggctaactgaatggaggtagggaggcaattgggtgttttgtaatgacatggaagggtgaagtttgaagttttaatcatcttcagtgagacgcttggctacatgtagctagagttacaaagattgactttgtgctcaataacagttgctgtttcttggacttcttagttggaaaaaaaaaaagctaacactaagtagaagaaaaaaaaaaacagaaggaaaaaaatccaaagtgggaaaatccattctttggagtgtctttgtttctaagcatagaagaaagagctctgttattttcttttctttttgagatgttttcttgtaacctcggcagttctaagctcactctatagctgagaatgatcttgaatgtctgatcctcctgcctccacttccaaaaactggggttgtaagtgtgtctcaccatgcctggtttacacagtactggggattgaacctaggacttgtgagtgcagggatgctatgggggcaagtccaccaactgagccatatccccagttctatgacttgtgtcactagtgtcacacagaactggattgacctgagagacagactccgagctcttcacctccacccggagatgagggcactggtcccgtctctgctggtcagtcctgtggagtagccaagtatgtccatgctatggtcttcccatcagcccagacagaggcaagagggtggatttctgggctgcagcctagctctaggtggtattcaacctctaactgcacatcctccttagctgttttctctgggagagctacccactcttttagccagcagcagcaagaccataccagaggctagaaaaccacagacagacagccccaggcctgcaggaaaaaaaaaaaaaaaaaaaaaaaaaaaaaaaaaaacaggacaaaactgatgctctgtgcatgatgtgacccaggactgtgggagctcagagccagggaccaggaaggatttctaggctgatttatttattctgtgggtggagggagcatgtgtatgggcacacataggatgctcgtgaagatcataggacaatttaccaaaactggttctttccttccaccacgtggaagtttgaactcagatcatcagtcttgtttacaagtgtctctaccgactgagtcatctcaccagcccacggatgttatttgtagcatagggcttaggaatcagctgccaagaagttcccagtatcccaggggaacccctatgtccaaacccctccccttctttcttctgtgggcaataccccttcacctcccaaagccggacattcctatccacagcctttagcctgtatcatacaggccaggaacagctgggctgcacggaccagctgggccagccttagacctgccacacaatgacccgccacccggccagaggaaaccattgtattgcttgggacttctgttagctccaagccacaggcaggaaggacagaactatggcaaggcccaagtggccatcaaggggccctgcaggaggaagggctgggtccagggaggaaggacgaaaggcaatgaagaggtcaggggagagccctgaccctgaggcaccttggcaggagatttaggagagagggtggcctctttgacatatgaatgacagccagcagcaggaaataccatcccacagtcccagataaccctgacttccctggttacaggggagaaaatctgtacgcacccagttcccaggccctggcagtggctctaaggtgggctgtgagctgggaacaccgccctagcagttcatcacattctgtaaagtgagcctctgcagccaggaccctagcttcccaggctctgcccactccccaccccacccctaccctaaccatttccatgtgttcacatcaggcaggcttatctgtcccgggccagcaagagtaaccacgctgacctttctaattacttgtgtttttaatcaaatatgctgcaggagaacaggatgggcagtcgttcaagcagcacctgcaagtcagcttgcttgttgggagacactctgccacttcccagatgttgacacacaactggctgggcttctagggttcacggtcagagcaaggtctctgttcccttaccttttcccggatgcaaacaggtacagtgcagggactctgtgtctaccaaaaatccccaggcaggaaaggggcatagtaggggtgtagaagaagcccccacactagctgtgagaaggccagagaagacagagcataaataagaatatattcctggtatggcttgaatgtaatagtaaacttgtggggtcaagttcatctctcagcagcccagcatgtacaagttgaaggtgatagcaggttaatggacaagaaggctgtttggttcaatgacaggaaaggagctaggcctgagaggcaagagaaccaacattagtcccaccagccacaaaacatgtgcctttcagaaccaccatttccttctgcattaaacagggatggtaaagactcttgcttgggggtggaggaggctcagcagatacagtgcttggcacgcacacatgaggaaccagagttcagattcccagcacccacaggccgcgtgtagtctataaccccagcagttcggggtagggtgggacaggtacaggcaggtccccagagctcggtgcttagctccagattcactgaagggtctgccgaaaagaaagtggaacactaacgagtcagctcagctctacttacagaggatccacatggcagctcacaactatctattccctaactccattcccaagtgatccattgccctcccggcctccaccggtgcctagcatacatgtgatgctcttagagacatgcagggcaacaaaacaaaacaaaacaaacaaaaaaacaaaacaaacaaaaaacatgcacataaaattttaaaataaatgctaaaaatacacaatggtggagttggaaaaatagctcaagtagttaagagctgacttttaatttgttgctcttgcagaagacccaggtttgattcccagtgctcacactgtagctcatagccacctgtaactccagttccaagcgttccagcaggcatgtacgtgacacctatgcatgtattcaggcaaaacattcatatagtaaataaatcgtaaaaaaaaaaaaaacatacattgcaaaggaatggaggaagacacccagtgatttctgacttccatatgcacacacaaaaacatatatacacgcaaacatcatatatatacacacagaaaggctttcaagactgatatggagacagatgtcaaataaacaagaacacacgtggaaatcttttgggaagcatattttaaccaaaatgattaagacatggcattcatactgccacttcccttcctgagtccaaggcaggcattactaatcaatctcagaactttcttatcaactgtatccttagcagaattcctctcaccatattttccaggaagccacacccaacagatcagaacccagtgaaatgtttatcccctggcaataatgccattatagagatcttcactggcccagacaaagctagatccccagagtggaatcctgaggtcctggttcaagccagttacccaaggactctgtcagctatctgctccccaggctggcattaatcctcaccctcccaggactcccaggactcgcactcatggtggagaaggaaagtgccagggtaaagcagcaagcatgcagaacatgagccagatgagccgtattctctgtgatctgggactggcactcagctgggctgtctgtgtttcaagagacttttgcactgccctcccttccccccatcctgcctggcaccctcctcccccagttcctcttttgcctattttagttccctgagaaatttttagttcagctcccaccatggcaggttcagcgctggcatggacactgctctagctcacacccaggaaagccttttccaggagggagcatcctaacagtgcccaggttaggaaagacaaagggccctcagcagcccgtagcctagccgcctcctccaagtcctccggggagcagttctcaaagaaggagctagccccttccaggcctctcagccccttctccgcctcttcctggcagaagtagggtagccccggggttgctcttttgagaagttggtccaaggcacactacaatacttcagcagggtcagctcggtccacaacagctaccagtggccctttggcttgtcaagaagcccctgctttatcagacacctttcctcctggtttctcccatcccaggcccagggagagcttcatcggagataggtagagaccctccagagatagataaagcacccgctccaaatttctgatggattccgtaaggatcaattacctcctcaaaatacagacttcgctctctaggcttttgctggtaccaggaacccaatatggcccttgaggctacagggctcctccctcctcttggggaactcagttccccactgtgtctcattgccaccccatcttttgccccaagggctagcacctcagggcacctccattttccaccctaagatcctgcagctgtctctacagcagcagcaaggtggtagcacccaagttcatggatgtagacagaacccggaccacacaaaacttcacccaaaacaggaaaccaccaagctgacatgcctttgcttgcagggtcccaagaagaagagacttagagccctacaggaggaagctgggcaggaagcgagtggttcttctgctgggggcctcctctcctttccacggagctgcagccatgcaggggtccccacaggcaaattcttagaagtcatctgagtggtgaggtctgaagcttagggctggagacaggtcaggctcccccaggggacaggctatactcatcgttcagctggtctgtgggttctagtctttgactggcctcacagccctgccactgaacagctggcagttcgccaggccattatccccaaagccaaacagaacaacacattctgtctatagtaactgcatagatctagagcaatggatggtgcagaagagtggaccctgaggataaaacaggggtcatggctttgatgccctggccaccccgacactcctatgatgatgatacaaagcctctaaggatccccaagccccaggtataactggcatcccacatcttggacctcatcagacaacttgtctgggtccccagcagatagcttattgctgcttcccggcctgaaactctctcttctctccccacccatctgtcctcagggaatgaatggggttctccctggctgcaggcccagaacaggagctttcctacccatgcccagttcagcccagccagtggaagctgcaagaagacatatggtaccactgggctgctgctctcccagacttagagctactttccctctagagactggagagtgatctgcccagccgtatccctcctcactctcaaacatcagctgcccatccctacctcacaagaactaccctttcttttcatgctttaaaatcctttctgaagactccccctgtgtgcccaggtcatgccaaaccctggagatgagagccaagagtagtatcggaccaggggcaagctcttctgtgtgcctgaaggtcaccctgaggtgaggctcagaagaagagtggtcagaagcggagtgatccctaggccctcactgaaactcccatccctatccccataccgggccctgcacctccagggccttaaagccagtgcctccagtccactcagctgttggcagccattgccacatactgtttttaatagcatctctttcacacttagaaatggtccagcatcactaggacattgtggaggtcggtcacctttgccactgctccacactgaatagtggtagtggtggatgacaaggacaggaagggagcgtgttcccctcatcatccccatcatcctctcgccaccctccctccgtgtccactggtccaggcctcacattgctcaagacactaatgagctcacagtggttcctgaacctgacatgtacttcctgtttcaaagcctctggccactgagctctgtggacggccatacaggtaatgagagcccagagccacgaagctggcaggccctcaggttgctggtggaaggctgctgagatgctcctctggtgggacataggccagccaagctccagaatccagggggatagagtcagtccaacagaggagcatcctcaggcaaacaagcaggccagccacacccccacagtgagcaggagtctctcacatcttgtgtctctctcccgggagggtggcaaggtgcctacctcatcccctccgggctactggtttccatgaagaaaggctcttgccaagccggacgttcataggatgcaggtcatctgacatctgtggctgtcgaagtcaagtctctagggagaactcagcatcccaagatcttgagaacagcaatgagcaatccaacatcttctccctgccccccaagtagcgtctgaaagagataggggagggtctgtgcatcttgtaaaagcagagtctaggctcagagcaggagcaaggaagctggagtcagtgcctaaaagactgtccaagggccagccatagatcaagtgcacatatccctgacccaggtaccatggttcatggttccccagctggtttagatggcttcagagttaggggagtcagggactggatctgtaaaagaaaagataaagaagtgaatggtggagggggagcattctgcatctccttgttcaactctgcaccatgaagattccccagggatggaggcgaggggggaggggaggctgcagagcctaggtcctaacactggtcagtcagagggctgtgaaaccgtgtgacacactcacctagggatgggaaaaagacgtccccagggcctggaggcgacagaggtgtgctggggtcagagagcaggtaccgtcctgactccgaaggttgccgctgggccacataggacagtggcggcctggtcttggcctcaggcatcccctggaagggtggagtggtctcgaagcctgggttttcgattccttgggtgttgctgctagagaagcagaattgggagcgatcagtgccacctggagatcagtgccacccagagcgccctgtcctccctgactccccccacccctttcattattggtctctggctgggacaaggacaacttgtgaaagctgtccagctctgaggtcctaatgggatcacgggtagaactttttttttttttaaacgtatctgagaagctgtctcctctgaacactttctaggacagagaccaagcttctggagatggctaatttctgagcccatctaagccagcccatggccaaccacagataacgttgtcctgcctgtccatctctgatgcaaccccccaccccatccctgcccagagcagctattggcttgctctttcatgttcaactggacggcttcctcttggagtgcctggcacagccaagccccaaccgtgaacaggagtgggtctgggccatgaacttcctttgcatgttgtagtatctgttccagccagcaacttccactcttccccatcctaagtcacgttgattactgagacccagaagtgcccactaaagcatgtccaataagaatcagggcatggaggggtgaaggtggtacacagagcagcccaccagcccagatgtgccagatgcagctccaaccagctctgtcttgtgctgagcaggggcctcacatcacatagaaactcctcttccctggtcccaggaagtttctcaaagtcaccatgggactcacctgtccatcctcaccaactcctgggcacctacagagacagaagagctggtcacaggacggaagccttgtgtaggctgcatcccaggaccctgtagtgttccctggggaggactgagttccatgtgtctgtccagcaggtggacccaaggcagagctacctttgtgcccaagtgaaatgtgtcctcagtcagaccttgagaatctaagtttccaccgaaacccaggcccctgcgtgtgctgctgactcggccttctgtcaggaagttgcctctctggtccttagccacaacttgttgggtggatagttcaaggtcaggtcttagaattagaaggttctttcttccctcagtctccccatcactcctcagcctctctacccactttctcccccgcaggtcatcactgcctcagcccatccatagggtccccctaaaaccagccactgtccagatatagcaacaccaacttccctcttttctgcagctccccacaccctcctgcagatccttcttgtagcaggaggtttacatggggaaatgggctggggaagggggagtggggaggggagggggagggagggggaggggagggcgcatctgcaagatgagcacagggaagttgcatagagttcctgaaatctaattcatttctgctgacagggtgtgggcctagctcatcctcaccacttggctctggggtaaagatggtgacctccaccttagagctggggggcactgagctgccttctcttttcttctgtcctgagcatgctcattcctaggcaacccagtgcccagcccaggactcagggctgcaagctgaaagccttgagttagtgcaccatgtaccgtgagctaaccttccaggggcttgctgcagccgggtgccatattgagacttgctggatgcttttggttgctactctggggtctgagtggatcagtgactccccaactgtctcatcctttggcactttgacttcctaagccctaacagcttctgacatcttatgcttctgtcatgagtctgaatggattcacagaataaatggaggattttcatttgaaggcagagtaatgacttgaaaatattcgctttagatgataattttgctttgtcttttgttggttttgtttgttttgctttacttttgagacagggtcttactatgtgactctgactctggctctggaactcactatgtagaccaggctagcctcaaacttacagagatcctcctgcctctgcctcctgagcgttgggattaaaggcgtgcactagaatatagattcttattcctttcctgttactgtacatggcacatccttactctgggacaggacaaggcttttttctacactcaacatggcatgagtgtaccccattccagtccattgtcaccatggtgctcttctctaagtccaggtcatgtgttttcctgggacagaggaaagtttgcagccagtgcttaaagtgagggtgcatggaagagatgaactgggatctgtctataagaccccacatgaatggcattctggcctggtaaaacacacacacaaacacacatattcctgcacatactcatacacatacatacactgttacattcatacaagtatgcacactcacacatatatacacaggcacacacacacacacactcatgcacatactcacatacacactcataccacactcacatacatacaaacacatacacacatacatacacccacacacatactcatatacatatgcatactctcacacatacacacaaacatgcacacactcacatacacattcatgcacatatgtacatatgtacattctcacacatagtcatacacatacactgtcacacacacactcacatacacactcacaaacacatatacacatatacatacatacacccacacacatactcattcacatatgcacactttccaatattctcatacacatactctcacatatacaaacatacacacatacattcatgcacacactcacatacatactctcacacatgctgacatgtatacactcatacacacacatacacactcatatacccactcatacacatacacacccatacacacattcatacacgtgtgtgtcacgtacacagacagacacacacacacatatacacacaagcctgtgcatgcacgcgcacacaaacactttcctccagccatctccattccactagatcccctgagcagaatggaaacctgcagagaccttgcaagaaaggccagacccaccaaaagcctgggggaagcctctatatgtgcttgtagcccccaccagaaaggactgctttccagttcttgtcccctgatctgacaacaggcagtgctaacagagtgggcaaagggaacagaaagtgcccaggaatctctccagagcctggcctccctgactctgggaagagggactaggtggctcttcaagccatttcttcccagtgcagagccctgggttcctccttcactctgacctgtcaccactttggagacgttcacaggcaggctgtagcaacgctggaattagatggaacagtctgagaggaagggtgaggtggccacagcccactgtggggctccaggctgggccttcaggaaagaggggaaggggagatggcaggctgattgagaggtgaaggggaggccagaggaaatctggtatgacctagtgacaatggtccttccctcaattaccttctgcagcttagcagaaggaagaggctggggagggatgtaagagcagaggactcccccctccagaccctcacctctcagagaatgcagactgaacaaggctcgttaggaaaggccagtgcagacgagaggcaccgtcacccagcaaaggatgtgattggtatttgtagcctggctctactgtttatttatagtgtgtttcattaggaaagttagggaaccttccttagcctcagtttgtccatcagtaaagtgaggatagcaatgtctcctatttgagttgctttggtgactaagtgaagcccagaggtaataacaggacacagtttctggcagggtagcaagcccccacccccctgcagctgggagctacttcagctctgcactcagtgtcctgcgacattcagttagttaagtcactgagcctgggcttttattgcccattacaaaacaaacccacccataggctcaagcaggtctccgagagatctctgagtagaatcatctttataaaccagtttgagttaaccccacccttctgggttgtcacctattcattggcatggagagtgccaagtcagccctgactgggtaccaaagctggcagacatcaggcccagagaaaggcacacgtaagcccttctctcatagccacagagccagctcctggcaggaagggtggagaaggacagtgcagccctccggtcctcccagccacgagccccatcaccatcctggaggacggtacttacggcggtgagaggccacctgtctctgcttatagaccagcagcaggataagggggaggcagaggattcccacgatgcaggcgccggtggccagggccgcagccgtgatgcctgtaaggacaaaagtagttgacgtgagggtccccttcctgccgcttctcctgaagggaaactgaggcacggaatgaccacagaggctcaggaaactttcataaagcctgcctgatttcagttctctgtactccaaggaggcacccgttgcagagaaagcttagttactaccatctggagcccggctcttaatgggaagagaatgacgaactggtgtaagcaccccatggtgtgtgccctttcagaatagggaggatgagaggcccaggcagcagggccccatagccagacccttagtgacctgcagaagccagggaggtctagtgacctccttgtgaagacagccttgtgtccctgatcccacgaggcacagggaaatgaggcctgttgcccacgacagaagcagctccaaagaagagaaagcaaccccccatcctgcctacaagggagagctcgactatcctggacctcagagtgtccaccaaaaggcccttcataccaaacgccagggctcaagaccagaaggagcctgagcaacgaaaacagattagaacagcactgttgcacaagagctactaacactgaaagatggatgtcttactgcaatgaacaaaaaagactccagcctcagctggcatgaggcacacaactttaatcctagcacggcagagacagaagcggaggctggtggatctctctgagttcaaggccagccagcctggtctacatagtgagttctaggacagccagggctacatagacagaccctgtctaaaaaataaaacaaacctcagtccatcctttaagggatccttgagttgtcttgggtgaggcccccctggaagtgtggcgatcacacacacacacacacacacacacacacacacacacacaccactgcaggaggataaaatttgtaccgcttggctaaatgtatagccccacccaaggtccatcccagcacttaaggcagggggaaggctagagcaatgtcatttttgttttatatctttaaatagatgaaaataaaggcacacatttaaaaatactcaaggggctagagaagaggctgagtccgcaagcaagaggccccgtgtgtttgactctccaggtgtggtcacatgtagctgtaaaccctactggtgggggaggtggacacaggaaaatccctggggatcagccctatcacctaactaactataagctgtagactcagtaagagaacctgactcattaacgtcaggagagagcaattaaggaatatccccagtgtcagcctctgggtacagaagtatgtacacatacacacatgcacacacagtaatgtatacacatatacaaaattcaaagctcccctccttccccacaacctgggtcccctcacacagtcctaacctacctagatctggtcttgtcttatgagatcacaggagaaccttgtcccagcacccaagcacagtttggacatctctgcctacacagagacccacctcactctttccagagctctgttatacacagctttcccaaaattgacggagacatccctgtctggtggcaacattgtttacttccgttttcaacagtcctctttctgcagcaagaaccccttaggctcagatctctgctcacccaggcaggacatctggacctaaacacttagcattgcagcactgagccagagagcattgcctgtgtgctttctcccagactgttgtaaaactgtctcaggaagggccatgtctctgcatgagccctgtgtcatgggggcttgctttatttcagtccatctgctgactccaggagtttagctgggaacagatgagcccttggaaccacaactagcgtaagcccatttccttcccaatttgaacctttctctctgccaaaacatgggtaggatctcttgtcataggatcggttcacctccagagagctctgggaaccggatgtgccttggtctttaagctgcctctgcactttacttgggaacaaaggccatttttatcccactgtatgctaagcaacctggaagcataaacacgctcccagtgagcgatacgaacccgagcagacctttggcaggcactttagaagtacccattggtatggaaacaggaccaattgctgggtgggttgcaaaggaagttgcaatccacagtaaagcagattccctgcaggttttaatgtggctgcgcttgaacgtgggatattgaaagtaagaacagtctgtaattcacactgttcagagtggctaaactgcatcctaggactttactgtgggcaatctgagaactggctgcaaacgctctcgtctctcttcccattgttactaagcaacgtgtggtgcagttagccaggtgctcacaagctgccttggtggtttggccaggacctccctgtctgaccctctggtctgccagtggcaattctgccctctatgagcagagcctgctcactcacagagcctatctccttatatgctgcagttcttgtccaggctatggtgggacaggctctggaggtgtatgtgtgggctcagctgccctcagaggctcaggattcctttataaagccagtccgacttcagttccccttactctaaggagacacccattgcagagaaagcttagttaccatcgggagccaggcttttcctgggaaggtgataagacactggtgtaagcagttgccaacaccaccccaatggcatgtgccaggctctttcatggcaggcaggctggggagcctcagcttgctcagtctatgtccagggcctgccgggtaccctgtgggtatatgcaaaggagtctggggaaagtgcctggcatagcctgccacattagggatgggaggggtacagagtcaggctgcacaggcctgccctgatctcaggggaaatccaaagccccgtggcaatgctatcaaacgccaggcttcttcccttacttatcccttacacttcctcttacctgaaacccacttggacttttacctagtgtgatgtagctactcttccgtaaaataacatttagccactcagacagggactagaaagggagaacccaaagatctcgtctggaagcatcattaatagacccagggaatgctgtggttgagctctgagagttgaggctggaactcaactctcaaatttaatgagcagtatagaatagttctcagcggctggccaagaggcctgttgagcaatggcatgggtggccagtgctaaatacattaagaaacgcagccatgtctgctatcagttcccatcctgccttggcacaggagtggataagctgccctgagtcattaggtctcgtgtatatcgggaggaaataggagcccacgcctccatggtgctggaactgttcatggagactggtggctgagagttcaccacagtcttcccctcttcctactgttttgttctccagcttcctgggcctgagacacagtgtgtttcccatccccgaggcaagtgcctgggtagcatttgcttccctgttaaagttatagttattcccattcctcaatggagaagtgatgtgggaagtaatagaactacccagattctccacacactcccaaaagtgcagcacacatgtcatacatgtatatatatacatacatatatatgtgtgcgtgtgtgtgtatgtatgtgtatatacatatatatgtgtgtgtatatgtatataaatatatgtgggtgtgtatatatatgtatatatgtacacatatatatgtgtgtatatgtatatatatatagagagaagatgtctaatgtctagactactagaatatatattagatatatattatatataatagctatgtatagtatataatatattagaaatatatattactggagccaggaatatagaaggggatatcaggtcatcagagtcatccgctgccctcaagcaagcaagttcttttggacctcaacaaaccaattcgctggacagtcgctcaaggaaacaggagccagaaagagatttcccagccccaagaactggggaggatttaaacatcaaaacccaaggatggaggtgtatggagaagaaagactaacccacctcggaggtcaagttcaaggcttccacctcacccttagagtctcaggagcagaaaagtccccagcctcctcagcccgaaatgctctaccatcttgtgtctctgttctcaagactgaaagcgtgtggcttcttttccaaaagttcacacctggggtcccagaagttgggaggcagaggcaggaggactgctccaaatctgaggctagcctggtctccgcagtgagttccagaccagccaggctctccctgaacctcatttccctgcccagggcatgcaggcagtaacagaaatagcagtttgccgagacaggttcttgaagaagcagcaggaccagggtggttgctcagagtgaagggacagaagaggatgctgagagaggaagtgaggatggcatggtggccagttgaagaccagccacctgctcagcagggtgtgtggcagaggggcttgatccaaaggtctcaccaccacactgccgtggctctcattcaagtcaacaaatcacggtggagtggtcggttgggtttgaaaatacaagtagtttgagtagaaagtcgtcttggtcattgaggtggggcttgagttgaggctgtaactcagttgtccccattctggcacaaaccctcatgtttgtctaaaggctgggatcacaatttttccttctgcctttccagggcctaagcaaggactggatcacattggatgcctgacaaacctatgcgacacagccctcttttcatagaaatgttgggcactgtgaaatatatccccttgtctactatatatatatgccatagggcattctcaaatgaacctctatgtcctcagcttccttgagagccaagccctgtaactcacccataaggtttctctctgggccagcaccagggctgacagccaccctctgctctgccagaaaacctacagtctagtccctgctgtgccattaggaagtgaatgtgtgtcccctctgcagattggctggcgatgcctgcttcacagagtgatcagtgacaggtagaggggcttctgaggccacagtcaagaaaagacagggaaatgaggcagcagagagggggatggggatctgcagtgagagtccttactgtcactgtcctgctcattagacgccatgcatgtggaccccgagcctttgcctgtgggaacaaagagaggtctgttaggtgagtgtaaggcccatgaggttgcagggtgagtccaggctagtgacttctcttgcctttcacaggaatgcatgctaatgcctgcctggcagtgctcgcccaggggagtctgtacatctgtgtgcatgtcttacattctcagatggacagacacacacacactctctctcttctctctcttctctctctctctctctctctctctctccctnnnnnnnnnnnnnnnnnnnnnnnnnnnnnnnnnnnnnnnnnnnnnnnnnnnnnnnnnnnnnnnnnnnnnnnnnnnnnnnnnnnnnnnnnnnnnnnnnnnnnnnnnnnnnnnnnnnnnnnnnnnnnnnnnnnnnnnnnnnnnnnnnnnnnnnnnnnnnnnnnnnnnnnnnnnnnnnnnnnnnnnnnnnnnnnnnnnnnnnnnnnnnnnnnnnnnnnnnnnnnnnnnnnnnnnnnnnnnnnnnnnnnnnnnnnnnnnnnnnnnnnnnnnnnnnnnnnnnnnnnnnnnnnnnnnnnnnnnnnnnnnnnnnnnctctccctctccctctccctctccctctccctctccctctctctctctctctctctctcctcccagccgtttggccaggatcaactcaaactcaggacacattcagtcccccatttgcctgcattttttcacaagcactgacactgtaggttcagatatacacaccctcttacattaaaaaaaaacaaaacaaaaaaaaaaaaggtcactctgtcacaaatagacacacacacaagataatcacacgtctgcaccccacatacatgcacccacttcttacacgaaactagtagtcatgtggcaggtatgcagacacctctccagccccaccggcctgcctgcccacctgccctggactcccaagccatggccacctgtgcagaatacctcacctgcctgtacctgtagctccatggacccgtagaaccgttgttctgggtggtggttttttaattctatcactagacagcagtagaggccgctgtcccttggggtcacattgcgcagggtgatagagaagttaccgtggtggtcagaagctagctctagcccatgcttctggggctggtcatggctggcgttggctttcaggtggcttccgtggtgctgaaggtgctgcaatgtgaagttgcgtatgggccggtgttctttgcacatctggacctcgcctcgtgagctgaggtaccacgtcttgtagatggtcacatcgtgccctttggacacggggcccagaatcctgcaggtgagggtggcattctgtccctcgggacacacatagagagaatatggagtggtgaccttgaaggctgctaccagacctgttcagagagaagagcacccctgtcacctgcctgagtgagcggcactcctcgctgccctccagatgagaaagcgtgacttcagcctcttcccttgcaagccagaccctgggcaagccagctgatctgagccttggcctcttgcttagtaacaagacccacatgggagaagcctccaggcctcccaagtgggaggggagccagacaaaagacaggccagccaacatggggccttctcccaagtagagcatgagtcccagccccagctccctggcaggcaatggccccaccttggacaactctgtcctgcacaaggagcaggtacagaggagaatgaaaggcctcagtctttggccacgctgaggggtgccagcatcttctacccaccccctctcctcatccaggcaatgccttcttccgtagcctcctcccagagcactaactgaatgcccacacagatggggccagtgcctggtaccctacctcagcttgacagccagggacccagctgagcaagcaagcctgcattaaggaccctgtgggcagagacaaaccagtgcccagttttcagagacttgggagggagaaaaaaaaatgccctttagggctgggcatggcccctccccccgggtctttggactttgagtgagaatttaaaggcgagcatttcgacttaggcacgatggtaggggaagcagggaaagtcgaagcgtgtgagggacagggatgaggaacgcgtgacaggtcctcgtgttccgcacccgctacccacccaaatgcagtcctctgccctaagcagataaagaagtcctcttgcctaccataacctcggctcccactgccctactgcttaacctgatggttcaccccagacatactatgtagctgaagatgaccctgaattgatctccctgtctctacctctcaagagctgagattatgaatataggccagcaacccagtttaaaaggcacagagtctcaaacccaggactctgtgtatactggggaagcactctaccagctgagccatatccccagcccaagttcactctagagactggaatatgagctggacactccgttcctctaactaaccacgtgagctgttttctcctctctaagaagaaagatgttcacggcagcacggggtaggaggggaggaaagatgggtatgctgagggctctggtcaccacagctcagcattgctctggttttaactgatattgcagggggtacgggagggctaacagggaaaaggtttagaatataaagagattacaaatggaggggcagggacggggtgggggccagtcacagctcagccagaaaaatatttgcctcaaaaccatgaggatccaagtttggactcttagaactcaggtaaaattctggagatgttagaacaggtctgtaactccaatgatgctgagtggggcaggagaagcaggtgggtgcctagaattcgactgccagctagatagacctggtgaagttccaaacaaatgagagaccctatctgtctcagttacggtcttactgctgtgaacagacactatgaccaaggcagcttgtagacaacatttaattggagctggcttacaggttcagaggttcagtctattatcatcaaggtgggagcatggcagcatccaggcaggcatggtgcaggaggagctgagaattctacattttcatctgaaggctgctagcagaagactggcttctaggcaactaggatgagggtcttaaagcccacacccacagtgacacacctactccaacaaggccacacctctaatagtgcctctccctgggctgagcatacacaaaccatcacactgtctgaaaaggtagccagaagacctaccaccaggcctaatgacctgagtttaaccacatggtgaaagaagagaaccaattcctgcaagtttgcctctgcaacatgccatgaattgtacatacacacatgcacccacacacaaatacatacatattttaaaagtctaacaatgataactgaggttgtcctctgacctccatacacatcatgactgcgcatgtgcaagagtctctctctctctctctctctctctctctctctctctctctctctctctcacacacacacacacacacacacacagagcctacgtgtattgagtgtacactcttttgactgccccatccataggtacacctggacccccccccccgtctgatgctctctgccctcagagcccaagacccttagagccaggctgggaacccccaaagctctgacagcttggttgaatgcagagagcagcagctcggtgtggcttttggagttggagcaggcagggctggagtccagtgacactgagtcactaggctgagccgcagactcattggaagacagaaataaaaacatcaatggaggccggtgggtgttacagccaggacaggaatcattcgcatgactgtccttaaagtattctctctgcaattcaagaaacaggcagatactagcttcaaactctttgtcacaaaaatatgaacgactagagagagctgatgctctagtactagagggcttgtgtgtgtaaattacagtaggaaggtcccaaagaatgcctggaggagcggagtcttagggctacaaagtaaggaatacagacattccggagccagtcgccagctctgcttacacacagagagagatttctggaatgttgttgccaaggtgagctgagatttcagaccatctttggtgagatacgatctccttttcaggcagagacaggcccaggaagggaaagtggtttggctgaagttgtagcaggtctagagtcagggcctgaaccataattacctcaagacaaacaggcttcccagaaaactgtgagatgcagggatgcccaggcgtgtgtggtgcctgtgacagccagagagagtagggctggagccttcctgtttcacaaaaggagaccaagtccatagacagagtgaagcagctttctggttcaccatcccacagcaagggaccactggagtacggcttcaaccctggcatggaccattgccaagctggaagcccacagagcccctctagccttcagaccttgcatctgacccctaatataggtgttttcctttgttttgtggggttgctgacttgaaaaggtatggatttatggctcggggagttggcgcaatgcttaaaagcactggctgttcttccagaggacctgggttgaattcccagcacccacgtgtggctcacagctagctgtctctaactccagttccaagggatccccgatgccctcttctggcctcctcagacatggtgcacagacatgtactctggcaaaacttctggacacatcaaataatttttaagtggggatttgatgtgaacaacttgactcccagcttctctttacagcaagtagctggttttgtccatggcagcctagaggttcccttacaggcctgtatggactaggtatggtcactaacccatggctctaacagagactacctacggctacctagggaaaggggcttcccagacatccacagaaggaaccaacccacaaagagtggcaatatctctgccctaaccccgtggccattggacaactatcccagtcccctctctcctctgttcaatggctcctgcctgagagacattactgttcttgcagccaaatttagttccatcagcctttgcccagcccacagaccctgggggctgtcaggagggcaggtaaagcagtggccaggcctgcagcgggttaaaggcggcaggacaaggggcaagatgcttagaaacaaaggcaggaatgaggtgggactcacatgtagcatgagtgtttctgaaactgggggttggtgtttggggtgccaagctgagaaccctcagagcagaagcaatggtgtttcaagctcaggcctgcaccagagcagggggaagggatccagacccatttcattgtcaagggaccatggagagagcagagttcagagagagcaggagagggggtgtggttccattccccaatacatttttcctgagttagggggaaggggaaactgtccttggatggttgaggttgggttggaatgtcagaatttaggattagaggcctatgagtaagcagaaaagacacagggtttgttctgacggagaacaggagggccagaagcatcccttatgtctgaggctcagagcagcctgaccctgggaggacactccagggcacagggttatgggaaacagtgcacaggcatacaggcatgcagaacagcctgtgcacgcacacacacacacacacacacacacacacacacacacacacacacacacacacactgttgggcagcatgcagcctggctggaattataattacttggcgggaggatgtagctcattgtcagctgctgatcccataggccacctgggttattgtccaggagagcaggaaagtgggtggggaggaaggcccctggctctagggtagctgagttcacgtgggacaggaaagtatcccgagccctggcctgagcatataccagtgaagagcactgctcttggggacaggtcccctgcttccacctggccctacttgccactaagactgccctacacctgcaggagggaagctgtgagctaggaaaattccagatctggagactggattctgtcctagacagcaagattcctggtccccggggcctcctacgctggctcgtaactacatgaacctctgcagatcccacccttctctgggccgctttactctgcatctgcagttaagggagtcccatgtcctgatgcccttgagctccgctctcaggtctatgaatgtacacagaggcccgaggtgtcagatctcctggagctggaattacagatagctgtgagccacctgacatggaggatgctgggaaccaaacccaggtcctctggaaaagcagcaagtgctctaaccactgaacaacctccccagacccctcagagtcatttctgatacgttggccactttatcctgatgtgggtataatccccaattccatatatttttgttttaatattattattattattattactactactgctactattatacttctgttgggtcttagggattgattgcctggtttttgtcttttgagccttttcccagctggtttaaaacacagaggatgtgccccagggcaaaggctgaagctggagcccaggctggtcttgaacttgtgatcctcctgtttctgagtccccagcactgggactataggtggatgtaccatgctatgcctcgtcttctttttaaagataagactgactggagaaatagcgacttggtacaggccacacacacacacacacacacacacacacacacacacagagccccacccccaccttggtagctgaatgggagacccacactttcagccagggggcagacaggaagagctgtccctccaaccctgctcccctaggtgggcggagctaacgttccatctttccactcttaggaggagttgacccagagctgaccccctacactcagagctacaactatcctttcctgctcctcacacccaaaccaaaacattctttcattccagatatttagctcaaggcacaggctgtggagctcagagccccctgaggggatcatccattcgtgatgctggcgacaggtggcacacaacctctggggaaagtttcaaaggcactcttagcatcctccctagtcttgttttggagactcaccacacatcaggctctgtgggcatacaggggatgggtgtggacagactttagtattgttttccttgacaggcgtgctagctttacccacagtcaccaaggcaacacaccagtttttggaggtgggtccaagcttgattggtccggctaggaaggccccaccctcagacagctgaggtctgtccagctgctggcttgccaagtaaacaattacttgactgtctgcctttactagcctcacacttaatgaaagagagatggggctctggccttccaggcatgggaactagtcccagctcacaggccccgtttcccaggatcttctccaggtgcatgaaggggaaaagctgggctctacctttaatgcgatgtcagggacagagggaaaacagaggcatcgtccaatcaaaacccggaggaaatgcccccagggtgaagggtgcaggctgaagccagcaggtctctgtggaggcttctgggctaatgaggacaaagggtatctcagatgtgtttattgatccctgccccagcaggaagtgtccattcatatagaccaaggagggtgggaaggggaagcggttctatgggaggaagccacacttccagcgtcttgggaaaccagcaggcatccagtagagcccctagccaccaagcctcctggggaggacctgggcagtgggccagggccttgggggaggggggagggaaggctcctctggaagattctgagacgagatctctctgaggagaactcaaccccactgccacttcaaacaggtcctcaggggtcaggccagggagacttcctaagatttcattccatccatgcaaggggctcacttggtggtcatgttctaagcacacacacacacacacacacacacacacacacacgggcttgtttatttaattaattcctatgctcgtgaaataggtgtttgggttagggcaccaaatcacaaaaggcagctgtctatagtctcacagagaataagtctgtggacaaaatgtaaacccaggcctgttgctttctccagaaactagaggtaaccagagactggctccgcctccctcccacagatggacagctgacctggccaatgagggctcagtttgcccggcagctgtactaactcaagtagttttgcttttgattttatgttaaataacactgaatcataaagagaggtggctgttcccatttcagtattccctcagctctgattatgtcaaaaggaaagtcctagttagtggcactctctccaaaatgtcctgttttatttttacttcattcatttctataagagactgcaacagcttttacatgctgagccttgtccaggctaagtttccagctaacgtttaattcctctatttggcttgccaatggtgctcttttatatgatctatttatggccagttacactcattttccacttgtgacacagacttaaaatttcctttaaaattttttttactttaaagaaaagtatagatctaaaggaaaaacagatactacgtaagggtgataagcaaatgaacccagaatgcactgaggggaattaccctctccctccccctcctcctccccccctcctccccctcctcctcttctgggagagcatcagctagctgtagcctctccactgggcccgatcagcctgattgctgctcagctgagggaagtgtgtgcttggagccccatgatgagggagtagctgacctggggtccccttggaagttgagaccctctatacagaagccacagggagggcttggctagtagcaagaagcagcaagttcgttactgaatgacctgttgggagcatagcatccctggcttccctctggaggtggccaacagtaactagtccgagtatggagatgggatgtgagtgacccccacaagtaagcacacctaggccaggctggctgtgatggtccagtatacaggaggcttaggaggagaacctctagacacccctctggccatttcagactccagtccaaaagggtagctagaaccagcctggggatcctttagatgctaggactctggaaaatgcattcccagtgatatttctcatggctcctaagtcccgggcacttatcggggctctgtaaggcagaagaagctcagatgcaaagccactagtatggagtccccagaaaccaggagatgatacactaccagcatcccaaggaccaggcaccctgggaagtcttgcctatcagctccacacagctgtgtgtaaggggaggcagaacgccaccctaaattacagatggaggcttgaccaaggatgctgaaaagcttgcccagctcacagacggccagctaagatttgaatacaggtctaaccatgaaacagttacgctggagtggaggaagcacctggggtgcagatagatatacaccagactccttgcttaaacaccaggaaggccatggtccaaaagactctccaaaagaatccataagtatgagaagccagtgctaacttctggcaaggccactggtcctgggcaacagttgcttttgagcctaggacctcaagtttaatacagcaggctcagtcagtaccaatagtccacatgggccctgtgaatcctctgtttttcctgcttagacctacgatcccgtatcctgaacttacagaggtgactcctttagcttttctgtggttcctcttccctagatccacagcagccttgcagcctcccagctccgccctccttcatgtttctggcccctgggcatcccaagacagccagctctaccctcaggctgctgggtggggcttaaggatttcctaagcgctgaccactaccggagcagaggctttcagcacggagtttactcaatagggccttgcaggcttgtttaccatgaaggggaagacagctgcccctctctggaacaccagtgctcccatgtgaatgggcctcctgggtcagactaaggacaggcagggtagtaacttcctcaaatcttagggacacttgtggggaagaggttctgtaccccttggggtctggggcacctggttccaaaggtaacccctgccccgccccccatcagtccctgtcaggccaggaaaggagtgtcttccatgtactccaagtgcctcctaagctctgactgtttgaagtccccccagataccccctccccgtctcaccctgccccaaacacaattcttttcaaggtaacccagccccaatgctgatggggggggggggggattcagcccccaggcctcctgaccaggtctgctacaggaaagagaaggaagacttaaagtatatgagttatgacttaaagtatagccaatgttgaggtcagagcagctccaggctaaaagtttcctcttgtttctttcctgaaagcctcctagatccctgattacctccctgggagctgaagggaggcggccttcagctcaccaatcagctggagtcagcaaatgcagtaggctgcgaaatctcttggggggtgagggagcccagctccccccagaacctctctgctgctgctggaagttctgcaagctgctgaccctctgccctgaagctctaggacttagtttcccaaattgaggctgctgaccagaaagcttcccattctagttagggtagggaagaggcaaggaaaggggcctagtggagtcacccgggaggaggatagtagcctgaggtagatgccatactggccttcctgcctgccactgtcctccgttcttagaagctatgcccctgatgagccttggggttgggagtgaaacatcccccgcctgtatcgccaccccatccctgccacaggctctctcctgtggtgaggaaaggcaggccagggcttcagtcttctgtctatagggtgtgggtgccttctttcttatcagaagtccaggccagcctcccagtattgataaagagttagttccctgtctctcctccctttcaaccccttaacccctcttccttcttttctgatgcagctattggctccctctgcggagctgagcattccatctctgtcctgacaatggtgactccctctggacccttcctctcccctgccttgcagaagccacccgtgccctgggttctgagcagggaagtatcaggcaggccatctcaggggacccacctgtctactgtttgggcaactatcagggtatcctcccctttttctttgagatcttcaccgaataaacaaagattgggctctagggagcccctgtgtcccggaacaatgtacagattgtgagtctggactttggaagtgacatctccctgtgtggggcttctgtgtccctgccgaggagttatccaagctggttgctgggctcaggggagtgtccctcgtgtctttcttactcatccaaatcaactcctcagctgtaataaggttaaatgacagaagcccactgatcactcaaacgggtccttagactttcagtacagagcaggtgacaagcatgctcagattcgggagtgtccatcaagactcacacacaagtgtcaagggggatagaataccagggtcacagcaccacaccccctaagtcctcttagactctgttgccagaagtcagggagatgccccaggtgtcaaaatgcactcagcaaccgccataggacggggtgattctcctccggcccatctcctgccttgcagaagttcttcatggcccctgctctggactctcgggtcagggaagtgtctggcaggcagtccccaagggacacccgtgcctgctgttttggcagctgttagcaattaaagatgtgcctgatgaaggatggagacaccactgcaccctgctgggctgtcccagcggagcagcggtaaggtgaaggttaccgcaggctgaggggattcagggcactcccatcctgccccctacactaccgggctgtactccctagagctctcgctagcaccccaccgcctgttgatcttacctctggatgcagccaggaaaatagcaaggagcagggttccccagcgcgggctgctggcctctgggaccgcggggacacccatgtcgccgtcgagccgggcaagagcagaaagagactgctggagtgcgcttggagcaagcgggactccaggagcccagggagccggctgtacacgccgctcgctcgctagagtgaatgctgagcccaaggcgaggcaggcggccgagcaagctccccgcccagcagcgcccccgaggggcggcgggcggtacggcgtctccagagcccagggatgggggtggggaagggctggagttgctgatagaagtggcaagtgtccaaccagccacttccccctgtaagtcccggtgctttttagagatcgtgagggccgtgcatactaaagtgtggaccctagtctaacccagcttgccttgcggttctcctagtctggaggcaggactttggctccctgttctccagcagcccagggtagatgggtgggcgggtaggtggataagtaagggaaatctacgatgactttagcaagtgggagggagtttggctcattctgcgcttgtgtgccctgcagctgatacacctggtacagttatgtccaccggctaacacacctgaaacacgcgcagggcatgcacaagcccagaacttcccaacctcaggacacgctcctgcatctgttggtgtgccccatggaaccttctcagcctctttcccccagggctttatctatggctgggctgttattcataggctcccttgattctgtcttgctggtagtttgttttcaacatacttgtgtggagttttgtttctgtggggtttgtattgttttgtttgggcggagttttgtttgtggtttttgaggggttagctttctgagacaggatgctgccttgtagctcaggctgccctcaagactcttctacctcgcctaatgcatgctgggattgcagggatgcaccaccatggcccctctacaaactcactcccatgctgtcctccgggccctcataggtatctacactcatccttgtacttgcgatcacttagagcttgctccactctgttctttcctggcctgaccttggagccccctccccaacccctcctgtcagtgcttccttcagccacaagaccagatctgagctaggaaccagtaaattccttacctgagttcccctgccctactgagttttgaggaccatggcctcccaccggtgtgtgtgtgtgtgtgtgtgtgtgtgtgtgttttgtatatatatatatatatatatatatatatatatatatatatatatatatacacatgagaacaccaatgagaacaccagaagatatatgtgtgtgtatacacacattgtgtgtgtactcatgtgtgtacacgtgtacatgtgtgtatgcatgagaaccctagattttatagatatagatatagtgtgtgtatgctcatgtgtttacgtgtgtacatttatctatgcatgagaacatatatatatatgtttacatatatacatatgtgtgtatactgtgtgtgtgctcatgtgtgtacatgtgtgtgtgtgtgtgtgtgtgtgtgtgtgtgtgtttatgtgtgttccatcatctcagactagccttgaccttcctgtgtaacgggaatagtcttgaacctctaattcttctacctctgcctactgagtgctgggattatagtggataccaccatacccagcttccccagtgttgagtcagacatggggactcagacattctaggcaagtactctgccagctgaggggtaccccctccccagtgattctcttcttcactctgtttcagtgctgggcattgatccagggcctcagggatgcgaggcaagtgcactgccactaaactgcatcaccagcctcctttgttcctttgtttctttctttgtttcctttctcttaacttctcaataagctccccgggagtgccttgagttgatcacagcctttctatcactggcctctcaagtatctgagatcgtaggcctgtcccaccacacacagcctcccagctcccatgtgatccagtcccttatacaggatggacgtgaaaaggctgtcatctgcactgtcacctgggggacagacttgaaagtaagccctgtctagatagaatggtagaggttaccaatgggggcgggggtgactatgtctaaggacaaggatgttgaactcctagtggttcctagctaaaggtcagaggacagtccaagtacaatgtcagggatccaactaggggcagggggtgggggctggtagctatacattgtagatgatatgggtggcctctcacaggctctatgggcacacccactctggctactgggtaagaaggactacctcaggaggatagtctgtcctgttatcattaggtgaccttacacgagtttggtacggctaaagctagcaaacaccctggcatgagaaccccagaaactatcaaaacataagtcaggcccctgagtgtgaatgtgaccttgggaccccatctggtgagacagctttgggtccttcttggtgatagaacaaagaatattctcttttgccagagaacagccaagacagcagagatgaagtagaaactaggccctcttcccaccccagccattctctgtagagtgctttcagggaagagcggggcacctcccctatcttgccccttcctccccctgacacacaccccagcactgaacatccttgggttgcaccacaggaagacacaggcattgcccaagctgtgggcctggcccagcaaacctcaagccctcctaaaaagcagggcaggctggggtgtgtgtgtgtgtgtgtgtgtccaacttcctcctcagctcagaagccaaggaaatcagaggggaggcagactaggacgtgcggggtgaggggcagtcttgttcaagccccctaccctccatccccagcagcccaagtgatggtcaggctcactcccaaggaatcgtcaaggagtgtgggacagtggccgtgaggaggctggactctaacctctccttacagctggtgtttgtgtcccttagccatggctgcagggactggggcagcgtggggcttaagccgaagaggaggaaggcaaatgctctttggccttccctgaaggtcattgcagtgtcacatagcactgtgcattatgaagagagatgtaaaaaccagcctgaactgtggagggcatgggagagatttcgaagaggtttcctgcctggaaggaatgctaaggtcattctagtgtcctgtctattcctgactcggtgtgaggtctttctccatcccagtgagaaatgttagcacagggctttctccccgtcaagtgcttaccatcatttacacatatttatctgttcatttatttactctgtgtgtgtatctatatgtatgcaagttcttggtggaggacagaagacaatggcgggagttgttttttctccttctaccatgtaggtcccagggattgatgtcaggtggtaaggtttggtgtcgagtgccagttgagccatctcgctgccccctcccctatctttgctgcctcactaaagattccttagggactctaagatccaagtagtgtgtgtctaacagtggggttcagtccacaggactacccacaataagactgagccccagaagagctgcactggaaggaatattaaggtctagacaggtccattattcacagacagtaaacacccagagaggaggtgccaactttaatgtcacacagctccttcttaaagctactggccctgcccactttggtaacagtcttcaaagcccctgtccccagcatccagagctatgatcctaagcgttctcaccccctcaggggcagtgacaccttcttaagtcagaagcttttccatcaatgtgcagttagctcccgggccaagcagaactgagaacaaagttgcagccatgttggtcaattacactttctatactacctgttgttggcatcaggacctccgaaacctgtgacatcacataggcatggcccacagacttgttgcgaaggcaacagccaccatattcccagaatccacttagctcacctcccacctttacctgtgttacatcatcgcccatgtcatcacccatacataaagaaaggtcccctaatctctctctcttccccccttctctttccaccgccaccttgcccctttttctcccagtaaacctcttactcgtggaactgctctggcctggcgtgctatatttggacatgggccgctattctaacacatcacctgttttccagccatccttggcaatggcctgctcccatcctctctctcgcccagccatccttagtatttcacagtagcccctaatcacagtgcattcgttacttttgaatagctaagaccgagggaaggctgggcagatggcgcagctggtgaagtgcttgccaggcatgtgtgaggaactaaattgattgggcccccataagaagtgggacatggtggcacagcatgggggatgtagagatgagagaatccacaggacagtggtggtacacatctttaatcccagcacctgggaagcagaggcaggaggatttctgagttcgaggccagcctggtctacagagtgagttccagaacagccagagctacacagagaaaccctgtctcagaaaccccacccctccccccccccaaaaaaagaaaaaaaagtgatgagaggatccttgggatctctgctctaatcggtgagtaccaggtttagtgagagaccgtgcctcaaaaaataaggtgtagggggcttgagcaacggctcagtggttaagagccccgagcatctttgttttcgatatttaaatacacaagaaggataaaatggaaaagcatctacttgtatgttcaattaacttataaggtcatctaacttttaataatttattgctaaccatgtatttcaattaagacccaaaccactgatatcaggaaatatgtccaagagtttagggttttaaaatttttaaatattatttattaattaattaattaattaattaagtggaagagtaacacacataccatagcacacgtatggaagtaagaggacaacttgtaagacttggttctttttctatcatgtcgaccccaggcagggatcgaacccaggtcagtagagcttggcagcaagtactcttatctgctgagccatcttggggggccccagtaaatgtaatggctaaaataagtttcttagggccgatgacacagctccgtgtgcttggagtgctcagtgctgtgtgcggtagttgtgtgtgttgtaggttccccatcttagagtgggcaggaagctcagagagggacggaatgggaaccgggtataagcacccaggacacgccccagttaaccctctccttccagcttggccccacttctcaaaggttctgtctgtcaccttcagaaatggcaccgtcagccgaggaccaagccttccacatatgaacctgtggggacatttcacattcaaaccagagcaagtggctggcttcagccgagctccctgcaggagtagtgtggtatatgaagaaaaggcttgactcaaacatttaaaggggggactcttcagaggggactagcggagcacctagagagcagcagtcacagccatgatgatgcaccacaaggaagaaggatatgttagtgacggtccttgttgtgtaacagaatgtctggcaagaggaacataaggatggaaggatttattttggctcaccactacaacccttcacggcaaggacgagattgaatactgggaaattaaggtagctggaaacacacccctaacaagggcttagggtgtgttgaaattattgttgttgttattattatgttatcattatgttgagacagtaggagataaggcagctggtcatattatatccacagtctggagtcagagagagagagagagagagagacagagagagctttcttttgctttattagtcagccaggaccccaactcatggacctgtgtgatccacagtaggatgggctctctcacctcagcccagtagataaactctcactgacacaccagaagcttgtctcctccatgattccagacccttccaccttgacagttgtcctggtggcttcctgtcagcttgacacaagctagaatcttctgggaagaggcagcctcagttgagggattgcccccgtcagactgcctgtgggcaagtctgtggggcatcttcttgattactgatcgatgtggaagaacccagcccacagtgggtggtaccattcctaggtaggtgggtctgggctgtgtaagccagtaagcagcattcctccagggtcgctgcttcagttcctacctctgggttcctgattgagtgcattgattacacactaaagacatcacaggagtatacaaatgtgtctatatccaattgaggggtgagaaaaaaaaaatcttgctcttgaagtagttgaccaagagagagctcaagtttgaattttccacttctctctgtgtgttttctttttatttatttatttatttatttatttatttatttatttatttatttatttattgtaagtacactgtagctgtcctcaggcactccagaagagggagtcagatctcgttacggatggttgttatggatggttgtgagccaccatgtggttgctgggatttgaactcctgaccttcggaagagcagtcaggtgctcttacccactgagccatctcaccagcccctctctgtgtgttttctgtctgtctgtagttgtggttgttggtctgtttgttttgtctgtctggtgtgtgtctggttagtccctgttgcctagctgttatgcctgtgtgttttgtctgtctgtaactacctactctatatccctttctgtgtatagatgtgtgtgggggagagagagacagagacaaagagacctgtgtctttctctctatctctccctaacaaagagtttgctctgaagaacatggaaaacatgacataaatatgagagattctggctggagagatggctcagtggttaagagcactgactgcacttccagaggtcctgcgttcagttcccagcaaccacacggtggctcacaaccatctgtagtgagatctgatgacccccctcttctggtgtgtctgaagagtggcagtgtactcatatatataaaataaataaaaggagaaggtgtgtctaagagagagagaaagagagagattctttaatagagatttatgagggaaaatgttattaaagagactcagaatatcactccaagccacacagatgtatcaacttatacccacatgttgcttctaacatttattggatatttgttgcttaaaattgcttttaacctgatggctgcttgctttcagcaaatgattaccacaacacacacgcacacacacacacacacacacacactattctgtgtcaggggaatggaagagtctataactgaagattaagcatatgcattggctttggttgtaaaagcaggttgcatgggagaaattcaagacatagtaggactggctctgtggttctcttcaaggcaagtcaaacttaagctgaggatagcaggctaactacgaagtcttagatgatctcaaggcatattattaacttggctgcaaggtccaccaaaagtacagtctcgggctggagagatggcttggtggttaagagcactgacttctcttccagaggtcctgagtttaattcccagcaaccacatgggtggctcataaccatccataatgggatctgatgccctcttctagtttgtttgaagatagctacagtatatatgcatacatatatatataagtccagtctcttcgaaggcaagaggtatgttcagagaaatgtatgaccacacttgagtttccgccctgacttcccttcatgagtgtgatggagaaatgtaagccaaataagccctttcctccccaggttgtttaactgcagcaacagaaacccagctaagacaaagatcagtattaggcatcacaagggaggtgacgctgttggatcccagaaagagctagagtttggagggtccccagcaggagacccccaaccaggacagggctgtggtgaggagtagaggggtagacagaggccacccacttgcctccactcccactcctgtcttctggccaactctgggaggcagacggccagggtcgcaggtagggtggccacacgagcagcctcccaggcagaagacagagaaatagaagtcagggaccacaggagaccagcacaccgggaagccatctttacattgcctcctaccccacccccggttgtgtaaagccagacagccatccacaaaatgttcctgagtgctgattggctgagtatgtttcatggtctgatggttcaagcatcagctagagatagccaatcacagaaccacagaaacttcttacagtaaagtcgtgtcctagggatctcactttagctcagaggttaacagattccaaccatgaagtctcccaagtctgatgcccttggtctttaaagtactataaatgtgcggtttttcttttttacacattggactgaagacgtcatgttctttcctcttgtaaacttatctggaagtgctctgaattgggggaggctactggaattcataccatgtgcctggagggtttgtggggttaatttctttgaaacagcgtctcactatgtaatcattgactgacctcagtcttactatgtatatctaaagtggccttgaattgatagcaatcctcctgcctctgcctcccaagtgttggaattataggtgtttgacaccatagctagctctctatgccagttctaaacattgggtcactgtgttgacaaggatctcaagcttatatctggcctcagcagtgctatgattgattgatgatgtctgccatgagcatagacatagaaatggtgatacatgtgctaacctggccctaaagagtttcctgacttgattttaacagagcctctgtatattctcctaccagcctgtgacttcctcccccacccattctctcctcttttctcccctatatgggatcctacaatggatcacactgagtgagtctaacccagaaaaacagcagactggatgaaccttgatctctctggcctcctgaccaaggcatctgaccatgttcttctctccaggccaccacccacgtgtacgtgactatcgtggacgagaatgacaacgctcctgtgttccagcagccacattatgaggtggtgctggatgagggcccagacacaatcaacaccagcctcatcaccgtccaggcactggacctggatgaggggccgaatggcactgtcacctatgccatcgtggcaggcaacatcatcaataccttccgaatcaacaagcacacggtcagcagttgagggcagagaggggggcaacctctcttcaggtggtgggaagttttgtgataccatagggtataaggagcaaacatagagcctagaaggaaatctggagtgcccagtgacagggggagaggggacagaaagttttgtggataggacctatctgccttcagtggtgctgagattgattaatgatgtctgtcacgggcacagacacagcaattgtggctaggatgtcagagtctatctggtataaccatagagttatatcatcatcctctccccttgaactttctgtgttcccagggtgtcattactgctgccaaggaactagactatgagatcagtcatggccgctacaccctgattgtcactgccacggaccagtgtcccatcttgtcccaccgcctcacctctactaccaccgtaagtggaatacatccccaatgtggcagtgaagaaaaacaaagaatacccaggagacttcctgatggaaggggaaggaaaagggaaattcctgttgggaggcaatgcctgcaggcagggactcctgcttatctgagcagctcatccagacttgctgcgtgactttgagaaagtcactgagcttttctctgactgtgtctagcagatgagtaaaaacccctgccttcttgcccttcatgctacctaaagcataccttctggtcaaggtaacagtgattcagatcctagctctttcctttcctggctatgtgactctggacaaatcacttaacctccctgaacttgtttcctgatgaatgaaagctatggtgtacgatggaggaggagcaaaggggaccacatgggatgtccagagtatgaggatgagttaacccatggtggtcctgttaatcagttgtgcccataaagacacacagagagtagaaacggggggattagaggttcaagaccagctcagactatgtaggaagagagagagagctggggtgaaggtcagtggtagagtacttgcctatcatgtgcaaggtcatgagttcgatccccagcaccacacatacacacacacacacacacacacacacacacacacacacacacatatatatacacacatacacacagagtgacacacaaacacatacatatacacacacaaaactacagagacacatgaatacacaactacacatacatacacacataggcacatagacatgcacacgactacacacagaggcacacatatccaatacacacacacacaaagatggggggacatggacccgagctcgggcacatgtagagcttagatgcccgcccaccccgtgatgccatacattccctttagtccctgggtgccagcgccagacccagtacaaggtgcagttgctgagtgtctccaggcatctggagccagtcctggctaagctgttcactgtcccaggtgctcgtgaatgtgaatgacatcaatgacaatgtgcccactttccctcgggactacgaaggaccattcgacgtcactgaaggccagccagggcccagagtgtggacattcctggcccatgaccgggactctggccccaatgggcaggtggagtacagtgttgtggatggagacccactaggtaagtggggcttatgctggcattgtggtgtgcgtggcccagggacctctcttcacctgctcaggactaggatgagggaagtcttcacacagtcttatcactggtgtgtgatcttgtcctccatggggctcaatgctacctgcctttatcaccatggaatctggggcataggctggtgctctttgagggccatagctctctaggcataggtaggaaaaacccatctcatacttggagaaatcttcagctgaaggaaagcaagcatccccactacctgtatctcaggaccccagaacctagggtgtacatttggggagcgctgagctccttataacatctcagtgtcccccaacaaaagcctacccgcctgggcatggtggcccgtgcctttaattccagcactcaggaggtagagtcaggtgggtctatatgagttcaaggccagccgaggctacacagtgagctctttaaaaaccaaaaagcctacacagctttcatggctactggccctgctcaaaggctcaaaggctggatggaggcttagaaaaacactttctctcaagacactttgttagctagagcaagaatttcaaagacttagggaatcaaccaagcgacacccgtgggtgtaaagggacccttcaaaaagctgtaataggcaagtagctgagactgtggcagccaccagtcacccacaggaactctggggtgccaggcctccccattttctaaggacaaaaagtgaatatcaaatattggtaaaatatccggctttccaattgatcgctctgtaactgtttgcaagaacctactatgtgctgaggacctactgtgtgctggccataccatgggatgcagaagagacacaaacaagatggaggggtgggggagaggtattcagaaagagcatcaagcacaaaggtcctgaggtccaagcaggcctggtaggatatagaattgggggagggagggaaaggtctggggtctggtaggaacttgagcaagagaaggagaaagagagggtgccatcaagaggtcttggcatttactgagtgaggtgaacacccacagtggctcttggagcaacatgacttgactcaggtttacacactctctctcaccccccacctcacccccacccctcaagttcacagcggctctaccgccaacatttcttatcagcagataaagggaggcacccaggccactcagcacaaaggtctctgcagcctgtgcctgcagggcctgctaccaggcccagtcacctcccagtctctagctcgagtatctgtgccacgctctcccaagacctccctgcttccatccctcatctgaagggccccaagcacaagaactgcagtgaactccataaaacctcagtcaggtcacatctgttccatgctcacagcccccgagatgctaccttcctccgtaaaagccgactcctctgcatggtcctcaaagccagacaaaaatcatctcttcagcctcattctcttattcagatccccactagacagtctttctgcaactctgtgagccttctggagatgctcagactgcaggacctttgcacctgccgaccctagcagttcttatgggaaaaaggaaagccagggaaacatgccatccccacttgagctttggccaccaatcttgcctccttctcgggacctcccagctacccattctgtccaagccgctctgggatcccttcccagttatatatcttctttgcaagctttcagtcccctagagagcgcctgggcttcttttaggatgccctgcccatatcaagagttactttgtgatcagcccaagccaagagaactcctgcctgtgagcccattttccagatgggacaatcaaggcaaggcttgggaagaatccggctgaaggccaggtacaaccagactgaaggttgtggcctcctatctctaggtatagaggatggggtgtgggaaggtattatgagttctggccaggggaagttgctgaagagactaattgtaaggggatagaggtgtttatccagggttccactatcattccaagcctgctcccacaagccttccattgtaatcagctcttccctgtctttgctattgtggaggggagccatttgccagcacatagccgggtgtcaacaggactgggaaaccccaagaaagggaatccccgagctttggaggccttggagcctagggcacaggaaatcctgcctcttcaacttcctcacccctaagcagagagagccaaggtccttagggagcctgggagcggaagagctggcggaagtcccagctgcaggtgggcatgggagctatcatggccgaagctgggcacccgagttagtgtcctggggtgtgagacagacaacagaagccaccaggatgcccgggcctctgcctttgccaagcctctgcgacgtgtgcctcactctgggcttagaccccaagtaccaaaaggaacaaagaaagttcgtacttctattccagcacttaggaggctgaggcaggaggattccaggccaacctcacatccttaccgatcaccagagccccagccccttctgtgtcctccacagaggctcccacttggtcccccggatcccttcacccctcacattctgtcttctttctctcaaatttctaccctgtcagccctgaggggttttatccagaaaacctctgaaccccaggggattcaagcctgttttgtcatgaacacactggaagcccagaggatgctcttctccagctcctgccttcacgttccgaagatcatgagccacagacattggcacttgtgtcagagttagatttctgttagccctccgcaggcagggtccaggggagatctgagccacaggggaaagaaatcagattaccacaggcctggaagatcgcgccctgtgttcagctgggggtctgaacaggagccaaccagggtctctcatcctgttagcctgctgcctggtgctcacaggagtggtcgtccttcctatatgtcttttctcacaggattccctacctgcacagtcacattggccaccagggcaggctggggagactagagacagctggctgagatctagctctgcccaaggattccaggttcttatctctaccaggcaaagaattcagagataagacaaaggaattgggaggggtttccctctccattacgtgcgtgtgcgtgtgtgtgtgtgtgtgtgtgtgtgtgtgtgtgtgtgtgtgtgtgcgcgcgtgcgtcctcaccctcttctaccttactctctgaggcagggtctctcactaaacccagaactcgctgagatgctagccagctggttctggcgatcatctgtgtctgccctctgggtgggagttacgggtgggaggatgatggtcctgaccttcacatgggtttctgggaatccaaacacccgtcctcattcttgcatggcaaagtgctgctctaacttctgagccacgtccctaccccaagggaggaagttccaccactgtaagaaagcacgtatcaaaaggaaatatgaacctctaaggagaggcaaatggctagttgtgctaggcttgtggtgttatttgcagacagcaaaggacaggccacagcgctttcctttggttatagtcagtggtggcagccagcatagacagttgcgtgacactctgctgtgacatggcccagtggttgctttggttccccagataccttgagctcttttttctacctgtctagaacacactttgcaaagtgcctaatatctttattagtaagtttctgaccacaaacggtcaggaagagtgtgtcatgggggagtgggaggactgccccataacccagggacaatggcatattgctggaatcccaacacttgggacgtggaggcttaagaataaggagtacagggccagcctgggctatgagaaactctgcctcaaaatagacagaaacaaaggttccccacccctacgttttaacacaaccaccacacctgcgtcatcctctggccagctggaggccacaagagaagctgattggtcaggaattgccacttgtcccttatgcccataaaggaccccgatgacatatgcctcagctgctcctgataccctcaggatcgactggctagagggagggagctcacaggcaggacctgctaactcggacctgttctggtggcttccaggggagtttgtgatctctcctgtggagggtgtgctgagggtccggaaggatgtcgaactggatagggagaccatcgccttctacaacctgaccatctgtgcccgagacaggggagtgccgccactcagctccacggtgagtcctggcctagctctgtggcatcccttgatgcacactgaacacctacaaacatggtctctcttagcccagagaaaccagaggtgcctctcaaacttagccttgaggaatcatggctctccagggtacttgcctcataataccgctcaggggctggatatctttctgatttctgttcctggttcagacctgtcgctcccctctccttctgctgcttggcttcttttcctccttcatcttcctctcccttgacaacccctctcagtgtttttgctaccttggctctgtctctgtcccatcctctccggtcacgtccacccctggctctcccttccccccagatgctggtgggaatccgagtgctggacatcaatgacaatgacccagtgctactgaatcttcccatgaacgtcaccatcagtgagaacagccctgtctccagctttgtcgcccacgtcctggccagcgatgctgacagtggctgcaatgccctcctcaccttcaacatcaccgctggcaaccgagagcgggccttcttcatcaatgccacggtagggttggatctgcccagggctcccagcccttcctaccggaggcccattgaggagctctgggttctagactggggcagagacttctttgtggtcatgaagaaactggaccccaaagcatgagcagcagcagttctaaagttaatcagaatccatgagtactagcacacacccagctcctggccagccattgcaaggctaagcaggaggattgctgggagttcacagttagcccagaattcctacaaaccctgaatcaaaagaagcaagcgtaagatggatgcagtattgtattctataatcctagcccttgagacacagcagagacattaggagatccggtcatcatggcaccatcgtttgaggtcagtccatgctgtaagagaccctgtctttcaaaaaaaaagtaaagcaaccaagtataatgaaaaaatctactcaaaataagtcatctcttgagccgggcgtggtggcgcacgcctttaatcccagcactcgggaggcagaggcaggcgaatttctgagttcaaggccagcctggtctacaaagtgagttccaggacagccagggatacacagagaaaccctgtctcgaaccccctccccccaccccaaaaaaagtcatctcctagagccagacaggttgtgggaattccagccagcaagggagcaccatccgccttaattaaacaacagagggaggcttagaaacaactgagttggtttctttggcttggacaatcaaccagtcacttggctatgggcgcattcattagcacagttgccctgatccagcgctgcccatgtggattgcggtgctcagtacaggaactcagtcccagtcagtcaggccccctttggttttattgagcagcaattttctggtatccaccaaccactcccttaatgcacccctcaagccttctcctgggcacacccaaacttcaaactgtaagatagcttgagccatacttaagtgcacctgagtttctctcctggcctcttggagtgtctgaagactgttgacatccaaggtccctcttttgggtttgcccagaacttggttatcactgacttaccatctccttggaaagatcctggtgccctcctttgacccttatctgttaggtactttagggaaggtacttctagctgcctaggaactgtggtcagagcatgggtaactggggtgtggggggtggggagtacctgctcatctaaccagccaggcacatcccagacagggattgtcactgtcaaccggcccctggaccgagagcgcatcccagagtacaggctgactgtttctgtgaaggataacccggagaacccacgcatagccaggaaggtaaggctgcaagacactgaggttggatggggtaaaagaggtggggaggggaagagagagggagagggggtggggaagccaagtgtgtgtgtgtatgtgtgtgtgtgtgagagagagagagagagagagagttgtaagagtgagaatggatactcaaatacacacacacacacacacacacacacacacacacacacctcccctggtgagcgggtggcagcttgccacaggcttagaagcacacatctgccttagcaagcgctggcttcagatctcagttttcctgtccaccagtatgtgcttgagccaattcattttcttcccagcctcccttttctcttgcatccttgagtcagtactgagcctggcccagggccaacactcattggatgccagatgaccccagatgtatgtgtatgtacacacataggactcagacttgcacttagaggccctgaagggggagggtgggctacagtgtccttcgaatgtcaaacacacaggctccttactgaaaggcagtgggtgctgcctgacggtccctttccggttggagttggtctgttcttactgctcctggtgtcgggctaggatcctgtgcctgtttccccagagctgctccgggccagctaagtggccgtgttgccacactgctttcttaatacttcagtttccccatctggactctgttctggaacatgagcaacttatcagtggctacaccaatgaaggagataccacccccacctctgcctacagtcctttgtgaggccctcatattcttgataaggcgcttgattttattgtaaagggatgccaactcggtcagatccgtatctgttggaatgaccgtgtgatttctggctctgggtccacttatgtgatgaattgcatttgttagtgtatactgaaccatcttgtcatctctggaatgaaaccaacttgattatgctgatcacctggaggtgcctctttcttaggcttccaagaattttgttgggaattttttgcatctctgttcaatcagaatgcgctgtagtttgttgttcttgaacagggttagggttctctgttgacacagaaagcagtcccagtgacagccatctcagggagccctttcttatatgatccctactgtcttagttagggttttactgctgtgaacagacaccatgaccaaggcaacatttaattggggctggcttacaggttcagaggttcagtccattatcatcaaggtgggagcatggcagcatccaggcaggcatggtgcaggaggagctgagagttctacatcttcacctgaaggctgctagcagaagtctgacttccaggcagctaggatgagggtcttaagcccaagcccatagtgacacacctactccaataggaccacccctcctaatagtgccactccctgggacaagcatattcacacattatgcctactgtgacttctatacatttcacagaagtgctgaaggttgatctgcagtatccacagtgtctgtggcactggtggcaattgtattagctgtggtgaggggagttggttggaccagtaaacaggtagacctcagggacaggagaatcagctggcagagtgataaaatattcctcttccctccatttccctaaatataatgaatcacttgtctgatgaggcttctatggtgctgtcttaccccaaagtgcatcctggggctttgaagcacagggtaccatctctgtgtccccatctgaggactgcagagtcatatttaggggccctagctttgtatgagagtatgggtgaacttgggctaacatcaatcagacatgaaggtctgaaagccaggactcaccttccaacctgaaatcccccatccgtaggcagcgtggtgtggctaagtacccttctcaccacataacactcccataaaagacttaagattcttgttgatgggggctggagagatggctcagtggttaagagcactaactgttctcccgaaggtcctgagttcaaatcccagcaaccacatggtagctcacaactacctgtaatgagatctgacaccctcttctggagtgtctgaagacagccacagtgtacttacatataataaataaataaatctttaaaacacacacacacacacacacaaacagttctttttgatgaaggaaggtggagataggccagtctgggcattgtatcttaagaagatcacccagtgatcaccagcaagatggcacttgatctcccgatcctgctttcagtccccatctctgagcatggtccccttcagtagaacagcatccagccttctcactcttctgcccaccacaggactttgacttactgctggtatctctggctgatgaaaacgacaaccaccccctcttcactgagggcacgtaccaggccgaggtgatggagaactctcctgctggtaggtgctcctagtatccgggcagacacactggggcctcaggtgccagggatacactttgtgaccagtggcatagctggacatagaacccagcggtacagaggggtgggtgcagctctgagtcttgggggctagggctgctgcagaggccacaggtctgtttaggagagataagagtagccactgatattgatcagcctggggtgatctgaaagcagccccactctaacctcaagagaggaattcaaggtaaaaagagttcccaggacacagatgaacccatcttccttgccctgcagccctgtagggtagaactcctgggacctgccattagaagaagggctcaagcatcccactcaggcagcctagtcattgcccctacacagcactgattgacctcacctccctttgatgcctgttggaggtcctcacacccctctctgcccccacccagagtccccagacattgatttttttgactcagaaagagacaaagccagatagtactgtctctgggtggatgtcaccgctgtgtggatttgactttgaaatctgctggtgtgcccatcggtgcattcaccaaccggtacactgccgcatcaagggggatgtgtggagttacatgtgtgcacagacacatgtaggcacgtggtcggccctatgacatatttcctgcactggcaagctgtgcctaccaacagagacagacacacagacaagggcacagccggaggatcctaaactggaacgtgccccatgtgcatgcagttgctaccatgtgatctcaggtgcccacacgcatacacgagtgtgtatatatagccatgtacagtcagaccttataatagagcaatgtctacatgcatatggacagacaagacacacacacatggtgggatgccagggagccccctagatcctccagtggagtggccagcctcaaaggctgctgggaagcaggcatagctccaggcaggccagaggggctcgctcaccgctcttgtgttttctccccagcagagctttgaggccactcccaggcatctgcattcagtctgtcaaggctgccgcaggcccaccccagggcctccctacccctccctgcctacctccccgccttccccctctcatccatcgtcagccatggtcatggggacacggacggggaggggggagggtggggaccaggctggcccgtggtgactcctctcctctggctcagggacacccctcacagtgctcaatgggcctatcctggccctggacgctgatgaagatgtgtacgccgtagtcacgtatcagctcctgggcacccacagtgacctctttgttatcgacaacagcacaggtgagggctgtgcagcagcttaaaggctaattccgtcgtgggactggcccaggcttgggtctagggtggtggttctcaacctgtgggttgagacccctttgggcattgaatgatcctttcacaggggtcacatattagatatcctgccatatcagatatttatgtcatgatttatagcggtagtaaaattacagttataaagtagcaatgaaaatcattttacggttggggggtgtcatcacaccatggggaactgtgttaggttgcagcgttaggaaggttgaaaaccactgttctagggttcatctttagcatgggcccaggttcttccagaacccttttgcccatagcccacagaccacattgtaactggattaggcccccagagcctcaatgggaggactccagaagaagagtagaggcaactttagggaattcgtgctacatagactctcagcccaagcaaacagcccccatcctctctctgcatgtcctatgtcctggccagaaacacaccctgttcagccagaaaaaaagcactgttcctatcctcaaaccagagcagcatccccaaggagtcatgtcatagcagtttggtcaggacaggaggccagtctggtgacaggaacatctagaaagcatgtctccccacagagcaggtcagtctatgccctggtcactctcggcagacaagacccctgagacttgcagaggccaccacggagggacaaccatagcaaacatgggtgttctgggatgtggggtccctgaaccagcaggaaatgaggtgtctttcctccctgtgtctgctgtggcggctcttgttctgtttgccaactgtatcctctccctgttcatctccctggcctgcggcacccggtggcaggcgtggtgactgtgaggtccgggatcatcattgaccgggaggccttctcacccccgttcctggagctgctgctgttggctgaagacattggacaactcaatggcacggcccacctgttcatcactatcctagatgacaatgacaactggcccaccttcagtcctcccacttataccgtccacctgctggagaactgcccaccaggtaacaagggtcaggcccagactctactgctgcaccagcaggagctgataggtagtgggtgggggcaagagactcggatggacacagaacgcctggagtagaagagcagcggaagactaggtgttctttctcagaatcgtggtgtgctgtcatgatcaagaacattcaatctgttttagggtttccattgctgtgcacagacaccacaaccaaggcaactcttataatggacagtgtttaattgaggctggcttacaggttcagaggtctagtccattagcatcatggcaggaagcatggctgtatccaggcaggcatggagctggaggagctgagttctatatcttgttcccaagacaaacagaagactgtcttccaggcagctagtgggagggtctcaaagcccaccccacaaggccacacccactccaacaaggccacatctcctcatactgccactcactccctgggccaagcatatttaaaccactacaccatcctatgaggacatcttattatcactattgtcattactttgagataaattctcaaaactgtcacttaggatatcctgaaatgtagcctaggctaacttcaaactcaatatgtagcctaagcagcttttgagctcacagtagtcctcctgcctcagtctctcaagtgatagtatttcaagtgggattacatgctggagagatggctcaatggttaagagcactgactgagcttccgaaggtcctgagttcaaaccccaaccacatgagttcaaaccccaaccacatgatggctcacaaccatccgtaatgagatctgatgccctcttctggggtgtctgaagacagctacagtgtacttacatataataaataaataaataaatcttactggggtttacttagggagtagggaggatcactggggtttactgggggggtgggtggagaggacagagacaggagagtttactgggtaccagtctagctccaggttcactgagagattctgactcaaagaaataaggcaaaaattgatagaagatgtctggcatcctcctctggccactgtgtgcatgggcatgtatatctgcacacacatacaccacacacaataaacagaaggtcctgatagatctttctaagaagaggcccaaatgctcacccactcctcgattcctgcttcccacaggattctcagtccttcaagtcacagccacggatgaggacagcggcctcaatggggagctggtataccgaatagaagccggggctcaggaccgcttcctcatccacccagtcacaggagtcatccgtgttggcaatgccaccatcgacagagaagagcaggagtcctacaggctgacggtggtggccaccgaccggggtaccgttcccttgtcgggcacagccatcgtcaccatcctgatcgacgacatcaatgactcccggcccgagttcctcaaccctatccagacagtgagcgtgctggaatccgcagagccaggcaccatcattgccaatgtcaccgccatcgatctcgacctcaaccccaaactggagtatcacatcatcagcatcgtggccaaggatgacaccgaccgcctggtgcctgaccaggaagacgcctttgctgtgaatatcaatacaggtacgaaggtggctgtgctctagcaccctctcctgacccaaacccagagtccttgctccctcctccctctctccttccttccccttcttcctctttctctttccctttgtgcacttgtggtcttatcctctatggatgtgtctccatccctcttcctttccttgctcccctgctgccgggccctcacctccgccatccaccaccctctctggctcctacagcctgcagtgtggcagaagtgttcatctccacacattcacgctggcatctggtgttgcagagttttaatgattgtagtttgagtggaaaacaataccttgttattgtatgcatttcctcaatagggaaatttggacaaacacctttgatcagtgcatatgggcattgaagtgttctgtaaattatatctgtgaccttaaaatcttcttccaccgtcataaaaacagaaccacaattttatctctcacggttaatcccgctgagtgtaatttttgcggttagctattggtccaacagttaaatggttttggtcctctggagagtcagggagaagcatgagtctaacaggagtgtcttaaaaacatgatggtgactaaatgctaaatgtggttactattgagagacatggactgaggcagtgtgggttctctgtagatgacagcagacagcaatatactgttgtcttgatagcatggggacattgggaatcttgcattaaggtagagtccagaccagggtcaccagcagacagggtacatttagatcccaggacctagcagcatagagggtaaaaagtggtgggcacacagcatgacatcagtgagccattgtctggacatacagccatgggagggagggttgtgttcagaataagtgctggctggaatggtaagaaacaggagtgggatgcacaccacagcagcatgcacaaaactgtaagagtgtagatggtccccaggaagacttaatttatttgtctttgagatatggactctcttggagcccagcctggcctcaatcttgtgacatagccaaaagagcccctgaactgatcctcttccctctgcctcccaagagatgggatttcagacacatgccattatgcctgttgtacaaagaaccaggggtaggatgacggggtcaaactcggcacctcctgcacgctgagccagtacaccacaactgggctatatccctagcctcagcacatgcatgccacaaaaacactctgcctgtgtagagaggcatgaaggaatagggggtggatactaaaaccgaagaaatgcccatagtcatagtatgcagtgagtctgagaggattaatctcacccacatctgtgacccaagagaaagatagccatgggcagggggtgggggggaagatgttggtagaactgtgtgctagtctaggtcagctccaagagggtcccagctcttcagtcaggatcactggagagccacccagccctgcttccctgcatagcaaggctccccaacttttctcttccttgctaccctgctgcctccccctgattgtttctctttctgttttccttttcagtgtctgctctgtccaccttcctcatggcccttagttcccttgctcagttttcctaccctttcttcccagatcctccaaccctctccactccaactgggttctcatccccttctccctcttgccctggccagctctgagccctacagccacctccccacccaacacatcccacccaccctgtccctcctcgctgcaccctgaactaaccaatgttaaccctctctttctccctcacggctggcaggcctacaggtttgagctctgttctgtcaccccacacctcatctcctctctgcttcaccccattgcctctctccatgcctcccaccccacccttcctgccctggggggccggctcaggccgtgcccagcctttgcagactgaacgcagctgccctctccccaacctcgctccccagcccgggtgcacggggagcgagagtaggaagaggaggaggaggaggcggccactcagggtaagtgaccacctgtggttggggacctgtggaggacagcaacccagcaggggctctgccagggggaaggatgtcctaagactctgatacctaagaaggagaaggaggtcttggtctagggccaatgagggggataccagaggagccacacaggtaccatcaggcaggaagaagaaaggctccagcagattggccaataggtctgcccagcaaaactccaacttccagagacttcctctctggttaatggggcagccagggactccgggagttaccaggaaagagagggaagctcttttcactaacatagatggatctttctgtcctgcaaccagcaccatgtcacaccctgcttagtcaggaaaaagggccacacctggagtctccagactgtccctccagggtacttgtccctcagcaggtgccagctgcttgagatcttcctagatataagtatttgtaaaattgtaacatagaacaaaatagagcatcttaatttctttttttttctttttttctttttatctggtactgggtgttgacaaggccttttctataaatgctaaactagggctccattaccacactgtatccacagctccatttctaaatttattttttattttaagacagggtctcacttaagttgtgttggactcatcaccctcctgtgtcacattcttaaaaattaaaaacttgatttgttaatttgttttattttttcatttttatttgatgtgtactagtgttttacttgcatgtatgtctgtgtaccatgtgcacacagtactcatggaagccagagagcatgcttaatcccctggaactgtagttacagatggttatgagccactgtgtgcatgtgctgggtataaaaccaggtgttccaaaagagcagccagtgctcttaaccacagagtcatctctccaatcctgtgttttaatctttggagtagctgggattccaggcatacgtgctaccatggtcagcttggtttaggtttttgagataaggtcttgctttgtaggccaggctggcctccagttcactagcctcctgcctcctggactccatggctaaggttgcatatgtatgcttctgggcttggctcagctcagccattttttttagtgtattcttcagtagtactgagaacattcacactgttgtggaatataagcacactgttgttttgttttgttttgttttaattacccaaccctttgtttgtatctgcaaacaaagttctaagtgctccattgatggaatctcatgtaatttttctgattccctggagcccctgaagtgttgttataagtcctgcccttctgtaaatgaggaaacagaggattgacagacagcttgcccaaggtcactagccttagctgaaggacagagagataggctccagcttatttgtgtgggtatgggccatgccagcctcaaatctcaggctccatcaaggactagtgccatcagggttggggtgcggagcggcaggagctcagagaagcccagaatccagagggttaccctctgtctgaatctgacttggtctcacctatagggtctgtgatggtgaagtcccctctgaaccgcgagctggttgcaacctatgaggtcacgctctcagtaatcgacaatgccagcgacctcccagagcattctgtcagtgtgccaaacggtaagactccctgatggcgtttcttattggtcactcagaaccattcaaggactgggtgggctaagagttagtacaagcctggtcctagtggggaaatcccaggactcagcttccagggctactagggacttcagtcaggctaccttagaaaagtgacagccacctcaacactcaatgtgtagggtctacacccttagactctgaaaagggaggagaatcagctgagagggcacccctagaaggcagggtggcagagaataaaaatgggatccagggtgtgtctaaagctagagtcaggaactgtcccttcgataagaatggaataggaaactgggggggtcaggacaggaagccaagagcaaaagaaggggactcaaggctgcaaaccacagtggcccaggctcagtgagagagaagagggcaagtgctatatcttctaggatattatgggctggattgtgaaggctaggcagatgggaaggggagagagtataggaatggaatattctctagtggctactgatgtaatacaaggaccgttgttggggtggcctgagcctggcagacactgactgcttatcttcacagccctgaaacccaagtttttcagagggacgtgcatacttgtttatctcttagacgacctgagattttgaggtcacaggcccaggctgcctttgctaaggggaccactcctaggggctagagaaagaaagaaggctagatcagagaaatgatctgcagccatcttcatcctacctctcaaagcctgttgggaaactgcggccccaaaaggaccaagggctccatcagagtcacctaggccattggtataatacaagtccctcttcttgtgatagagaaatgatcagatcggagggagaggtcacaggttacagtctcagagttgagacagattcttaaggggaggtgactcagttggtaaagtgcttgtcttgcaggcgtgaggacccgagtttgatcctaagaacccacataaaaattccaagcacagtaacacatacctgtaatcccacgactggggaggtcgaggcaggcagagccctggattttttttttaagatgtatttattttacttatatgagcacattgtagctgtcttcagacacaccagaagagggcaccagatcccattacagatggctgtgaggcaccaggtggttgctgggaattgaactcaggacctttggaaaagcagtcagtgttcttaaccactgagccatctctccagccctgatccctggaatttttatgaccaatcagtttagcctacttgctgagttccaatcatagagctgaggaagagcaactgaggttgacctctgcccttcccactcgtgcacacatacatgcatgtgtacttgcacgcgcacatgtgcatgcacacacacacactcataagcatgagcaacacacataagataaaatagtgtgagacattgctgtcctctgagcttgggacctctaggctctgagggggaaggaagacccatagaacttggaaggggcatcagggtgggacacaggtgtctatttctgttattaactcacacccataccccagccaagctcacggtcaacatcctggatgtcaatgacaacacaccgcagttcaagccctttgggatcacctactacacagagcgggtcctggagggggccacccccggcacgacgctcattgccgtggcagccgtggaccctgacaagggcctcaatgggctgatcacctacaccctgctggacctcacacccccaggctatgtccagctcgaagactcttccgcaggtatgtggcagatctccatgcatacccatgcctattaggacctgcaggactgtggctcacttaacccacatccagttgggatgcaccacacccccaccccagcccctgccctttggtagcctatgcgagattcaagatggttgacgtgccagtcattttccgatgctcccagcggaggatagaattttctagtcctggacaggatgggagcccacagatgtctgctggaaccttaataggcctcgccgtcacttctaccacctgagctcctgtgagcacatcccctgggagcagggtcacaacctgggaggtgtctcagaagccttggggtcattaatattcattacccccccccccagtacaggaagctttcttacctctttgttgaggaggacaagtgatggcaggcagtccctcctctgcctctgtcctgctatgggcagtgctacctacccacagtccctgtaaagcacccctcctcccctcaaagcctcagatccttcgtcaagtatgagagcccaggatgagagtggccacagctcagccatgggcgcctctgtgtctcagggaaggtcatcgccaaccggactgtagactacgaggaagtgcactggcttaacttcactgtgagggcctcagacaacgggtccccaccccgggcagccgagatccctgtctacctggaaattgtagacattaatgacaacaaccccatcttcgatcagccctcctaccaggtaggtggacagaccaaaatgggggtcaggacctgaccctattccttggggtctttggtgtggtttccaaaggctgagcacaggagtaacatgttgccctggggcctcgctgaatcagtgaattcctgggcagggcataggctctgggttgaccctgccttcactctccttctacccctacccctcccctccccctcccctccccctccccttcccccgctcctcccccattcttttgtccccctcctccctcttcctatccaccctgccccctctaggaggccgtttttgaggatatagctgtgggcacggtcatcctgagggttacagctacggatgcggactcgggcaacttcgccctcattgagtacagcctggtagatggagagggcaagttcgctatcaaccccaacaccgtaagtcgacagtaggagggtctgaccccgggagtgggagggcccagagtcctggtctgaaacatcacccaaagcatcccaggtacatgtttctgggtcctgtcacatctgtagacctcaggcttctttagctaagtaagctaactctcctcagagtcccaggggttgttaagactgtgacccacaaatgaaagaaggaactggccctttggtgacatggcccaaaactccaagttcaggagaccacacacttgagactgttgcaagaggctgaggagccccgtgggaattgggtgtggtgtttgagcacctgctgaatgcataggcctatagtcaatgtggaaaggggaacggcaccccaaagtgtgggaccctcaagtccccatcggtctcagcctttcatgatagtaggaattcggaggaaaagatgagctggtgattcaggtgtctgcttgttaaaccagttatttccagtgtgaggaggcagctttgtggcaggcaggagtgccagcagagccttccgcagttcctggcactggggtttcttgccctctgtgtcccactgcacacttcccttcagggggttttactcctgtgcactgagcacacaggcactgtgcttgcaactgttaccagaatacgtattctatgccaggccctggttaggcagttggctccagcctgggctagtcactccatctcagatagaatgtggtaggagggggacaaagtaccagaaaggggacaccacagagactactgctcctcttcggagcactggtacagattctgatagtatctggccatagtagataatcaataaacatgtcaagttgatgatatctgcctcctccaactagggcgacatctctgtcctgtcctctctggaccgagagaagaaggaccactatatcttaactgccttggccaaagacaaccctggggatgtggccagtaaccgtcgagagaactcggtacaggtgagggcacaagcctgggcccacgacgagaggcggcaagccaagtccatggagactgactgctgcaggcaggccaccagcctcctcgggcatggtggcaggaaagatgagatgttggctgctgggcttcctggctgtggcttcaggaagaagaggagaaacctctcattcccaatgctgcgtggacggccaagtacacctaggcgtgacccaggtgacacctggctgtcttcccgacccagcatctcaaggtgccctacaaagccatacggcaacaaaaactaactataaactagtcattttcactcgtggctccttatttatttatttatttatttatttattacatttttgagacagagcctcactctgtagcctatgctggccttagccttggagatgctgtaatgccagtgtcccaggttcctttcaaactttttgtagctgagggtgaccttgaactcctgatcttcctgcctctaccacccaagtggtaggattatagcgtggacaaccatgcctggtatatgaagtcatggaatccaatcccatagcctcattcattctagctacaaagagatcagcactcgaccaactgagctccaccaccccccagcctaaaacgctgtctcaaaaaaatagacagtacagatgggtatggtgacacatgctttaaatcccaccactcgagaggcagaaggatctctgtgagtttgaggccaacctggtctacataacgaggtctaggctagcccaaaaagaccatgtctcaaaacataaattaattgactagttaaatgacagggctttttacctggcttggtgccctgtcccttctctactccaccttatccttgtgtaacagggtttcctaaggcagcccctttcaggctctggcgatctccccaggtggtgatccgagtgcttgatgtcaatgactgtcggcctcagttctccaaaccgcagttcagcacgagtgtgtacgagaacgaaccagcaggcacctcggtcatcaccatgctggccaccgaccaggatgagggctccaatagccagctgacctactctctcgagggccctggaatgggttcgtggccttccttggctgcccaggagggttagagggcagggaggggcaggctgccatgtctgtcaccccggcgggggacaggaaggctgtctcagtcagcccattcacttcctctctcccactgccagaggctttctctgtggacatggactcaggcctggtgaccacgcagcggccgctgcaatcctatgagaggttcaacctgactgtggtggctacagatggtggggagcccccactctggggcaccacgatgctcctggtggaggtcatcgatgtcaatgacaaccgacccgtctttgtgcgcccacccaatggcaccatcctgcacatcaaagaggtatccctgaccctgggcccacgcccacccaccgatggatgcatggctcccacatccagcctgctgcctcagcctgcattcaccacctgacagtgtagaaggctggccccattgcaagagtatgaacacagaaggcatactcgcccagtgccacatgggaaagatctggagcatggactcatcccatgggcaggatgtctaggaagtcctcagtctaggaaaagatctgggttcaagtgtagctctttggccaagtgatcgtgagcaagcgactcgtcttgtcttcctcttgagaaggggataataatagaatacacagcatctcttgctcttggacaaggagtatctggtccctggcacccacttcccctcagacgtagttcaaaatagacaccaggctgcccttccgtctgtctgctggccctgccaggccaaaacacatccagtcagggacaaatgccctgtcttctgctcttcctggctactctaaagacccagtgatccttagtgtagttgggacacctctaacttgtcctttacctcctaaactcacagctcagaacacctgtgctgagaccatcttgttattctgtctccttctcttttttaaaagatttatttattattatatataagtacactgtagctgtcttcatacacaccagaagaggacatcagatcacattacggatggttttgagccaccatgtggttgctgggacttgaactcaggaccttcagaagaaggtgctcttaaccgctgagccatctctccagccccattatggatccttcttgaggtcctgtatgagaaaatgatcccaagtttaagtgctaggaaacagtgggccaagggtctgtcaaaccgcagtgatccatcagcctttttgctttgcccaccatggtgtcccgaccctgcagagacttggggcacatactttgccctcagcttccatcttacgctagctgtaccctaatttctttttttttttttactcgatctcattttaattcacatattcttgtcaactgcttcaaatcttcttcagtgaaagggactgggacataaattaatgataatctaattcttttctgcaccacaggctgcatttgctaagttttcccttcacgggctctgtatttggggagatctatgtctcctgaacatttataaagtaattatctgtcaccccacttttatcactgccatttggacttctacttgtgaataatgagaaaatgacgatggccagatgagctgagaggtttctaacagtcaggaaccgtgttcttcttgggaggagtggaaaggacgcttagggcagggccggtgtgggactacagttgggcttttccaggtctgagtctaagcttatgggaatgcaggcatttgaggcttggctgaggcaagagctcatcacagcctggttctggcatgttccatgcccacatgctccctccccgtgaccccaccacaggagatcccgctacgttccaatgtgtatgaagtctatgctacagacaatgacgaaggcctcaatggggcagtacgctacagcttcctgaagactacaggcaaccgtgactgggagtacttcaccattgacccaattagcggcctcatccagacagcgcagcgcctggaccgtgagaagcaggccgtgtacagtgtaagggggcaggcctggggtggggcctgggggtggggactgcctctgggggacttgttccattgagcttccttccctagggccctaagccaacctccaaccccatctttccactctgactgggctccttcacctctagctcatcttggtggccagtgacctgggccagccggtgccatatgagacgatgcaaccattgcaggtggccttggaggacatcgatgacaacgaacccctctttgtgaggcctcctgtgagctcactcatcccccataccagtgacaccccacagggacttccacctgtgagcccacatatgcacatattctaccctgacacacactgggtcatcacgcagtgagcctccacttagacgagctccccacagacagcgatgacactcaaagttgggcactactgcaaggtatcactcaagtgatccaaaaacccggcaaaaatgcccaatatctatgtgtgcatatatagtcatattcatcatgtatgtgtgcacatacacagcataaaagttgactctggactcttgagccaaaactcagccaaaaggacagcgggactgaagagccctggtgtagcttctgtgtgtgtgtgtgtgtgtgtgtgtgtgtgtgtgtgtgtgtgtctgtgtgtctatgtgtgtctgtgtgtctatgtgtgtctgtgtatgtatatgtgtatatatgtgcatgtgtgtatatgtacatgtgtatatttgtatatgtgtatacatgtatatatgtatagtatatatgtgtatgtatgcatgtgtatatgtgtatatatgtatgtatgtgtatatatgtatatgtgtgtatatatgtatacatgtatatgtgtatatatgtatatgtacacacacatacacatatatgaatgatatctcatagaggctgtgtgcatgcacataagcatacagacacttgatggaacatgcattcagatactgagggttagattcatcagaggttaagccctgatctcatggagattagagtaaccactctaatctgcttgctctctgtgtgataaaggcctcagacccacagggtagctaccagaggtcctctggccatgcctgaagcttgggcctcctgtcacaacctcctctcttacagaagggaagccctcagtaccagctgttgacggtgcctgaacactccccccgcggcacccttgtgggcaatgtgacaggtgccgtggatgcagatgagggtcccaacgccattgtatactacttcattgcaggtggggtccctggagtcagtgccccacctgccctgggtctggagaggactctgggtggccttgcactcaccctgtgcctcgtccactcccagctggtgacgaggacaagaatttccacctgcagcccgatggacgcctgctagtgctcagagacctggatcgggagacggaagccaccttctccttcatcgtcaaagcgtccagcaatcgcagctggacccctcctcgtggaccctccccagccctcgatctgctgaccgatctcaccctgcaggaggtgcgcgttgtgctggaggacatcaatgaccagccgccacgcttcaccaaggctgagtacaccgcaggtgcagggaccagccagggcctgagggcatgggtggctccttccctgacatttatgtggcctgcctgttctccacaggagtggccaccgatgccaaggtaggctcggagttgatccaggtgctggccctggatgcggacattggcaacaacagcctggtcttctatggcattctggctatccattacttccgggccctggccaacgactctgaggatgtgggccaggtcttcaccatgggtaggagcccctgtcactgcgtggacttcagtccagagatggagtctgtgtgagcacaggacctaggtggccatccatgtcagcccttccaggagggcagtttctgctagtctatttattcttccccctcccccttcccttctccctctgctttggccctgctcactcccctcccccaaaaccccctgcttgctctcacccccgcttgctccagcccataggtttttttatttgtccctcattatggatgactgtgagccaccatatggttgctgggatttgaactcaggacctccggcttttatctactgagccatctcaccagccctagtctatttgttcttcacttatacatttccctctctctatacacatattctttttgtatgtgcatgtgggggtgtttttatttatttgaaggagggaggtacatgcccacagaacgtatgtagagattcagaagacaacttggagtctttggtttttctccttcactgtgcgagtccccagggatcaaaagcaggtcatcgggcttggtggcaagtccctccactcactgaatcacctcactggtcacagggcatccatctggcttcaagctctctctgtagtcaagaatgatccccgagccatgcatggcagtgcaaacctttaatccccgcactcaggtgacagaggcagacagatgtttgtgagttcgaggccagcctggtttacatagtgagttccaggacagccagggccatccagtgacagcctgtctcagttaacaaggattttgcgtgcctgattctcctgcctccgcctcctaagtactgggatcacactcctatggcaccacaccaagtttatacggtgctgggagtgaagcccagagctccatgcacgctgggcaagccctctgttaacagctataccccaggactcttgttttctcaccttcttatccatccatcccctctctgtcgtccactttccacatctgtacccctcctcttgtgtggcgcacagttgtcaaggcaccggggagctggcagccaagccgtcatggcacgcgttgcttgagttttcatctgtgtggatgggcaagacactctggtgaagagcccacaaggcacctactcatccctatctgacacgggatcctcatctgtgtttctgtcttgacgtccaggtcttggcctgatatccagggctcccgtatcttcctctggtccccacttcttacctcatagcctctaccctctatactgggctctgtattcagacacaccacatccctgggtcactgacccgtttgccttcatttcctcaacgcccaaccttcacctttcctgagatgcccaccttcaaggtttagtgaagatctacctgcttgagttggatagctggatctcctgagcacatactgtgctttttaaaatgtgatgctaggaaccaaacccagggccttgggcatgatgagcaaaccctgccactgagctacgatcccagccctgctgcccttactttaacaaaccaacttacagagaagctatggaacttgccacatacctagaaagtggtgggttttgaacccaggtcttttgtcttttttagagtcatctaggccagtggttctcaaccgtcctaatgctgagacccttttaatacagttcctcgtgatgtggtagccaccaactgtaaaacagtcattgctacttcataactgtaatcttgctactgttgtgaaccataatttactatctgtgttttccagtgcttaggtgacccccaaaggggtcaagacccacaggctaagaaccactggtctagcctgtgccatctctagtcatctctctgttatatttgtggaattcctaagtacatgtgtctacaagcagtgttcctcaacctgtgggttgtaacacttttgggggtcaaatgactcttccacaggggtcacctaagacaatctgcatagcagatattaacattatggttcataacagtagcaaattacagttatgaagtagcaatgaaaataatgttatggttgggggtcagcacatgaggaactgtattaaagggtcagcattaggaaggttgggaaacactggtctagtacatgggaaagaccctacagagctcagaaatggctatcacatctgggcaggagagcctaaagttattcaaaatgcagtgttggggctggagagagagctcagagatggctgttccagaggtcttgagctcagttcccagccaccacacggtggctcacgaccatctgtaagggatctgacgctctcttctggtgtgtctgaagatagctgcagtgtcctcatatgcattaaataaataaataaataataaaaatttaaaaagtaaataaatgcagtgtttacataaagctggagcaaccactaaaaatcaggagcgtttcagccaggcatgctagcgtatgcctataatcccagcactcaggctgtggacgtggagaactctgacttcctccaaggatgtggcttagggggcagggcttatcatcagtatgtgtggcctctgagctgtgccaccccgactctttaacagggagtgtggacggtatcctgcgcacctttgacctcttcatggcctacagccctggctattttgtggtagacatcgtggcccgagacctggccggccacaatgataccgccatcatcggcatctacatcctgagggatgaccagcgcgtgaagatcgtcatcaatgagatcccggaccgcgtgcgtggcttcgaggaggagttcattcgcctgctgtccaacatcacaggcgccattgtcaacaccgatgacgtgcaggtgacctggggcccaaggactggggcgatgggaagagacgggggacagaagaggcccctccttaatcacttcatagccacatggctttgagggatggccccgggtctgtagacctccatctccttgtctgtaaataagaatagtgaaggagccttatgtgggagttagcagccgagtccaggagacccaggagtgatagggctcctgcatgatgctggcctgtagtgtcccatccccagtgccagccgtgtggccttacgcccacaaactccctttctccccagttccacgtggatatgaaagggagggtgaactttgcgcagacagaactgcttatccacgtggtcaatcgcgacacaaaccgcatcctggatgtggacaggtgagtgcatgtgtgtgtgtgcatgtgtgtgtatgtgtgcatgtgtgtgtatgtgtgcatgtgtgtgtatgtgtgcatgtgtgtgtatgtgtgcatgtgtgtgtatgtgtgcatgtgtgtgtgtatgtgtgcatgtgtgtgtgtatgtgtgcatgtgtgtgtgtatgtgtgcgtgtgtatgtgtgcatgtgtgtgtgtgtgtatgtgtgcatgtgtgtgtatgtgtgcatgtgtgtatgtgtgcatgtgtgtgtatgtgtgcatgtgtgtgtatgtgtgcatgtgtgtatgtgtgtatgtgtgcatgtgtgtgtgtatgtgtgcatgtgtgtgtgtatgtgtacatgtgtatatgtgtgtgcatgtgtgtgtatgtgtgcatgtgtgtgtgtatgtgtgcatgtgtgtgtgtgtatgtgtgcatgtgtgtgtatgtgtgcatgtatgtgtgtatgtgtatgtgtgtgtgttggggggtcatgtttggacggcctgttatggggaagaggaaccacaaaggaggcacagactttgccatcagcctcactgcagggtcagagctggggaagaagacagtgaggcagcaggaacatgctcatccctctaggcctcacagattagtcaggattccactgctgtgaagagacaccacggccacagcagctcttataaaggacatgatttaatgtcctggctggcttacagttcagagattcagtccattatcgtcacggtgggaagcgtggcagcatccaggcaggcgtggtgctggagaaggagccgagaattctacatcctaatctacaggcagcaggaagagagagagagactctggacttggcttgggcatctgaaacctcaatgcccaccccccagtgacacactccatccaataaggccacacctgcttcctaatggtgctgctccttggtgaccaagcacacaaatctatgagcttatttgggtcgttcttattcaaaccattgagccattcttattcaaaccaccacattctccaataaaactccatttgtctggggtccatgaagaccctggccgcagacacagaggccctgtaagatgccatgctcacccagccaggtggcttttctcttgcagagcttcagagcagcatgtgagcatgtggggcttatggtgggaacagaacacactgccccagaatggagggcggtgggtggctggggtagagcagaggccatggctcctatacagggtcatccagatgatcgatgagaacaaggagcagcttcggaacctcttcaggaactacaacgtgctggatgtgcagcccgccatctctgtccagctgccggatgacatgtctgccctgcaggtacgtgtgttgtgtctgtccccacccgcctgcagtctgggttttgcccctggaccagcctgctaatggctggcctgctatgtccacagatggccatcattgtcctggccatccttctcttcttggctgccatgctcttcgtcctcatgaactggtactacaggaccatgtgagtgtccccacctcctgcctgaaccagaatagccgatgtcccccagacagtgggcaccaaggcaggcagggccgaggaccagaggtaacaggccagcttcccttatggagccaactgacactctctccctccccgctccctcttcctccttccctctctctccagacacaagagaaagctaaaggccattgtggctggctctgcgggtgagtgaaggttgttgggggtcaggttaagggggcctggtcctccccttggctgtacccttttgcccctcactcaaattctctccatgcagggaaccgtggcttcattgacatcatggacatgcccaataccaacaaatactccttcgatgggtgtgtggactcctcaagtctgcagatctccttaggatccctacaggacccagctacagagaagttatctgtagcagctgccaccctggctgaaacatggagtgtgggctccccctagtggtcttatcacttctccgcactcttagaaatgtgttgtccaggtcccaattaagagggagcagagggagggggtgaggcctccctgacaaagctgacccaggctggtaggcagtcgtagctctcacaggatcctgtaacaaaaggatatagccataggagctgtggcagagttcctatgcagccctgctgaaggttctgtggctggcccagggaatgggcagtcttagaggcaaggcatcttttctaccctatgctactccccaactacagagccaaccctgtgtggctggaccccttctgccggaacctggagctggctgcgcaggccgagcacgaagatgacctccctgagaacctgagtgagatcgcagacctgtggaacagccccacccgcacccatgtgagccagggtggcagcatgcagcaggccgagctcaggacttgggagggtggttccctaccctatgatgtcaacctccctgctccagccaatgctcccctctcctccagggaacttttgggcgtgagcctgcagcagtcaagcccgatgatgacagatacctgcgtgcagccatccaggaatacgacaacatcgccaagctgggccagatcattcgagaggggcctattaaggtgagccctctcctgcagggtccagtgcccagaccctgtttgaatttgacccctactcaaggatataaggagatggtttatctggacccgccttctatcaggatgggagtttgggcactagggttaataggctcggcagcctgtggcgtcttcggaactgaacggtcagttttcaggctcttttcccatcctcttcatttgaactggatacctgtagaaccgtgactgccatgggcgtgtaagagctaggggcaggcagcagcctaagtgggaagttaaccttctcccttcctcagggctcgctgctgaaggtggtcctggaggattacctacggctcaaaaaactctttgcacaacggatggtacaaaaagcctcctcctgccattcctccatctccgaggtagtgaggtagcctcgggagctgggaactgtgtgccgtgccccattcctggggatgcctctctctctctctctcccccccacccccccccctctcgttactgggagttatctgctcttctgttaacctagcagccaaacccaaaagctgctccaggaagtcagaaaagagattatgatgtctggatactgtggagtctttcctagaaatgaggtgggctcaaaagcagcggttcttagtgtccaggaaccccaaaccgttaccttctaaggagcctccaccttaagaaacaggtcaggagggccaagcaggcctgtgtatcctgggctactgttccagcaactagggattgccagttacactggctttcccaaaatgcccatttccaccggggtatatgctacaaagccttgcagccagaccaaagtgctcctcctacttctagaggttctacctggccctgctttcctaccaacttggttacaaacccagataccacagtagtgtccagactaatacccacatgcttaaggacaggtggtgaaccttttaatatccagcctctgccttccatttgagaaggctggcgggcctgttgggtggctctgttagatgcggtaaagaggccagtgtggtcctggggtgaccgaccggcttacaccgcaggcacagccctcagctcactgtagtttccgagtcatgagggtgtccctccttctgcagctgatccacaccgacctggaggaggagcctggggaccacagcccaggccagggcagcctccgtttccgacacaagccacccatggagctcaaggggcaagatggaatccacatggttcatggcagcacgggcacactgctggccactgatctcaacagcttgccggaggacgaccagaaggggctggaccgctcgctggagactctgacggcctctgaggccactgcctttgagcgcaatgcccgcacagagtcggccaagtccacccctctgcataagctccgggacgttatcatggagagccctctggaaatcacggagctgtgatggcaagcctgcccaccaccctccgaggcaggggcacggccggcccttcgcccagtacagcctttgtgggtgaccctgggctggccctggcagcctgcatggcggctcagatttgcctcctgccaggaactaattcagcatctgatctctaccttcataaaattggttatttttttaagaaaactttaaaaatgctaagtgtctaaggacaaggtgaggaggatctctgggggagccccagagactgaggcccagctcagctcttcccgacgcctctaaggagcagggagccagcacagaactgacaacccagccggcccacccctgcctcagtccaagccccactgcacttctgcctgctggacgtcagggtggcgctccgcccctgcacacacaccagtggatgagggaacaaagcatccgccccatcgcccccgcgtcgtcctgaggtgcccaggtgacagccgtgactgatgtccctccccctgggtgttgaatgtagagtgtttgtgtgtaacccttttctaaattaagttactccctcaggatttcctccaggttttgtttaactgatgctcagtgaaagtctctggaatgctctgtttaaaaagaaaagcaactcacatggaaccagcaataccctgacttggtgccgtatgaaggtcctggggggatgggagggagccccttggccagagcggctgctaggagctgaaggggaaggggaaggggacccagaacccactctcttctggctgaggtatcaaagagacacaaggccagatctgttggttaacagaactttattaagtcacagaaactttagtgcaaaacaaaatctaggtccatttaactgcacaggctgtctcctggcaaccggaggcacaggaagcttctactctacacagagacccctcagttcatggcccactgccaggcagacgcttcactcatgaggtgaacaggcaggtcaacaagagctacaggtggtgggaaagccgtgcaggaccccaaacagccaggcagaggccacacggtcaagggcctcacacacaaaagaccaggcccacgtgaccgtcacacggcacaggcaagttacattcacaagtttcccctccccaccctaccccacagaaccccaacaaggcagacgggaagacaggaaagcagaatggaaggctgacccagggacagcaacatcccaagcaagccacctgcaggtgcttctgaaatctctgtgctatgacaatggccattccatcgctctaaaggcctgatcattctgtgcttctaatcatccaaaataactccttggtaccacaggaagctgggtagctccctcatggtaggagatggccatagatcccccacacaccaagaaagggctcagaaaatgctcctgccctctggctcaccacccccctccagcaggtgggtgaaaagggcagccggggagctgatgcccaaggtatcctcatccttcgagcagaaaggggacacggaagtggctgtcagcacctcttacatgacagaaatgctacagtaagggagaggagatgggggaagggcaaagggggttcctacttattaagtcaaatagatctatgtgttcattaccctagacccacaagtaggtgacttctgcagctgggaaactagttccacacatggcgtttgcaatgatcgacagcctatgaggagaaagggagacaggtcaggtcagacaggacaagccttcacgcgtcacttgcttgtcagcgtcactccaagtgtgacctgctttctgctgacgtcacagaagctaaggaacctaggatgctatcaaaacaggacctgtggccctcagagctgtgagatctctgaaaacactggcacggaaccagaggcacagccccttgctgtcatgtaagagtactcctgcagtaggcaggactccagcccccagtccctgctgcttgactgaaaaatcctacagcaatgaacaagagctcaagaggggcagcctcaggcccacatgctatccatggggtgtgacagtgcagacaaggacaggaggggcccggctgactcacgtccctgagaaggaacgacaaagctttatgcgctagaggccaagaccaataccccatcaggaaagcaagtctggcccccagggctgctcacaaacaccctgtggagcacccttgaaccaaggcttcaagggttgagctaggcctccgtcagtcacaaagtgtcccctgggacccatgaggacttgtgcagaggcagggaccatgggccgcacaggtttggtgcaatccctggtggctgtgcatgaagctggtaagacaataccaggggacacagagatggctcaaaagacaaaaagcatagccacgcaggcctaatgccctgagctcagtcatccccgacaagatgacttgttagaggcacagttagagcctcctgttcccatgaggtgatccaccccccagcacgctgtaggagcagtcaggatactcacattgcatcgggcggcagtctccatgttctgacaccagtagctagggccccagacacacttctcggttcccagcagcagcttataggcagaagggcaaactccaattttctgtatgacaaatgacgagaaatgagctgccctgccaggccccattcagagctgagaccgaagcacttccagcccctgacagaggtctggctgttccgcttcctgccccactccatccatgctgccacgaggccccggcatctggcgcggcttaccgagcacacaaatccaggatccatcacttccacgaggatctccaatagcaagggctcatactcagccacaaagtcatcgcactgccaagaaaaggggcacgggtcccagtgttggctgtgtccaccagagaccctgacttcttagaacccagggtccagaggctggtcactaccctaaggccttcttccatggcttcatgtgcttactgcctctcaaaacctcaggcctagagcacacagggacaccaccaccacccccagcaccgcccccaacacacactggaacattagcagtgaacggacacgcccatacctgcttctggtaagggtctggcaggaagctgcagcccttctcaagtgcggccaggatttcctccttggtgctgtttttctccaggttatgttccaaatagaggaccagtttcttgcacacctcacagaacccaccattcttctgaggaggcacatgggctacagaaaggacgacacagggcttaacactggcaagtgctccttaatggagagcggccccttcttccctcagtgtgccgtggacttaccgggcaatgccgactgcttgggctgtgcgggctgctttggcggtgtgggctctttgagcagtgcagatacaatggctggcgcaggctgctcaagtgcctccaccaactccgggcgggcagcacagaggccgatcacaccgcacagagagctggggtttacctcatggataaagatgtccaacagggaggggccaaatgttcccaccacctcctggcacttggttctggcaggatcggggagcagtgcgcatgcgttgctcaaacctttaactaggagctcctgaaacaggcgaaaggcgcatcagactggagctggacacaaagaagagatgcaaggcatgccaggagccagtccagagttgggtgctatagccctcccctagagacctccctcctgggtactggggtatatatctgccaggagaaccatcccccccccaactcacccaggcaccttctgagcactcctccccgcccccatgcaaggaggccagcatacctcagtggcattattgacaatcagctcagaaaacttattcatcacaaactgacaggtctggcataaaatcacattgtgggcctggaccagattctgctgtgaaggacaagaggagagtgttttaaggctgggacctgacccctcgggcatgcttttaccacatgtttcctaaaggtgtgaagccaggatctagattatgggcacgtatagaactcctccaggtttcaactcgaaacacattcagaaggcaggcagggcccggagaggacgtgacaccatgggaggatggggtatctgttccagtcggcagagaacagcaacagaaggtacctcataggggtccatcatctccagggcagggaggatgttcttaatggtctcggtggcagggaccagagtcttcattggcactctcttgacctcattacagaagccagccagcacacagatttccttgggttgctgaagaaagcatggcctgtgttagacagcctgtgtatgctgccctcaaacccttccttacacagcagagcagagctgagggctcgtgtaaagctccctcttcccactcaggctggcagctccagttaaataaagatcactgcgtgtacacccagttccacctagaggaagcgcccctcaccgtaggatagtcttctagcactttctgtacccccaagcacagccaggctacgtatgccagctcactgtcaggggtaagctctctggatgggaactataaggctcatgatctcacagaaagcccaatgtgactatgtcagaattaaaatcacatggaaaccccccttcagtgacagttccatgtaaactggtacactaaggggaagaaaggccgcttttcccagaagccatattctgtgctcacaactgtacccagggcatgtgagagcccaggacctgagctgatcagatatttcgtcacaagggcttcacacagatcccctctcaccatcctgacaccaagccagagagaaatgagtgtggatattcagaccaccacactgcgaaagccaagagcaagtcccatccgcagaccctgtgtggtgctgtgtgaactgcgtgtggcagccctcggctgagcccagcgcaggagcagaggtgctgagaacaagagcacgcacactgagatacactgagggcaggttcctaaactccctggctttaacacaccttacaattaggagatcaaggccagagagagactaaggtacaaaacctttttttaggggggtgggatggggtgaggggtgggggtgggcaagattcaggggcgggggcgctctgtctgaagcagcataaatgaaaactcaggcatttccatttaagcccttccttatgagattcaaaatgcctttcagcttctagaactcaaaccggagagcctggaagcaatgttcagaacagacccactcgggcactggctcggccaggatggactgagcactgattcccacagtatgccatctctgaggctctaggtgccccaagacccactctctaaagggcagaaggcacaatcgagaggccatgtgtaaggctctccacccagcaggccaggccactgtctgcatctagtttgcccatgcagaagcactggggtgagggacagcgctaagacatgcaatgctacccactgtgaaagacacaagtgttctgtcagggccctggctttcggcctttgccaccaccaccctggtaacaggtgatgtgctatgtgctgacttgggcataggctctggtagctacaccgtctggcccccaggatctgaagtgctgaacgtaagggaaaggacatacggggacacccttcgtggtacctgtcagagctcaccatgccagaccaaaaaaaaaaaaaaaaaaaaaaaaaaaaaaaaattaaaattaaaaaaaaaaagcaaaaataaataataaataaaataaaataaaataaaagagagaatagccaacaactagaagcagtagactactaccaaaagcaaattctgtcacatacctgatcctgctgttgaacaaaaaaacaggaaatcggaggagtcaatgagaaaggaaaggacacagcagttaagagaaattaaaacaaccatggagcagttaacctggcagagggatgtcatcgagtttaagggcaacaccctggcaggaagggatggatggggccgagagctagtccagccctgacagcatgcatgtggctgctggaaactgtccttgtgaagggcctccacctagagctgatcgcgagctttctggcctttctaagctccacacagagcagactccacaacctcaggccagctgccagcctggaaggtgggtgtgtgggctttggttgggaattccagctgcagttaccctaagtgacaaacagggatggttgaaaggatgttgtcgccccagaggcagtctgctgtacccacaaaggtcatagaaagtcatatgaattatgttctatccgtactgtggcttaatatgaagccacatacaggagtaatgactagtagggagtgatcatttaaccccagcatttgggaggtaaaggcagccacatgcagtaagaactagaaactgagaccaataattttaggggaaaaggaaaattaaactgtgtttccccttttataaaaaaaaaaaaaaacaaaaaacaacaaaaaaaaccagctattgtttttagggaaaagggcaaattaaactaagatggaatacaaaatgatttcattggtatattttcaaaacccaaattgtttgatacagaaaaaaacttaaaaaaaaaaaacttcccattataataaaaacgggtagcttccctgaaggaagcatttcaccaggccactccacatcaaagggtatcttaaccatggaggtctttacaagctgtctttagatgtttgtttggggcacgagcaatgatctcaaacaagccacccagccagatggaccgcttgggcagcaggttagcccagcagctggacagtaagtatatacaaagcaggaaagggctcaggttcaagcatgagtaaggactcacgacagtccgtgagagagggagagcagggcatctcgcccactcactcagctctgccagccacatcagcacggttcaagtctagatatcccccatgccccatgtcccacctctcaggcaatgagccccaccccaccccgccccctggacattaccagatgccaattttagctagggaacaagcagcagctgtagctgattctttcctcctgacccagaacacgggctccctttgaaatctcccacccgctcagtggcgcaatgctccttcctatacagatgccagcgctcagccagacactagcaatctgacagccagctcatgcatgcacagactagcagacctaggctaccagggcagtccagggatcacattagctaaggaagactttgtgggaggaaggatgggcgggatcgtgaggagaagttttactctggccctcaagtggaaaaaggggaatcccaacgcatggagttaccaatgcgaacactgagcggaggtcccgccacctaccatgtgcatcaacatctggacacagacctcggaatactggtccacgtagttcttgcactgcagagagacagaggttcagttcaccacagcccaactggcttttcaacagtgccaactggtgacttgcagacggacatggacgggcttctaatcccaacaaccatggacgaggccagcctgagctacacagagagacctgctctcacaaggaacaacaattcccagaatagatcgaagtgtccccttaagattttctaagatactacagcaatttagttattctaccccctacttaaaaacctgtagagatgtcagaacaggagttggcagtcctcagtgtctgatagcccaaatgcctcccaaggccacagagcgaccattgttagcaagatgagaacacagctgcaaaacaccagtagggatcttccaaggccattcacaggctctcgggcactaagtgagttctgagaccacagaactcaatgtccttcaagctgcttatcaggcaaccccactgctgtgggaaaagagagctgtgagcctcattcacagaccacagcccttcgttctagaagggggatgccatggagccagacagagtgagttgtatccctgaggacccacagccaactcccacaggttgtcctctgacagccgtgcatgtgtcgtgcatggtacacattttagtacatggtgacagaggggaaaaaacagctttcccaacgtgattttcctccactgcagattcaactaaccaaaattacatctaggtctcactaaacgcaccggggaaaccctgaggcaccttcctcggggccactgggaaggtagcactacctgctgctaccctagctcagaacattatccaaaccatggggctagatagaggcttactatgtcagacacgcctggccccaagcggtcacaatcctccttcacgtggtccacgaagccctggataaagctggagttggtcttcacagcagtctggacatcagacaccagcttcatacagtcctggcagacgtcctcgttagcctacaagagaacagcaacaagctccagggagaaagccatatctcacaagcggccacagcactagacaggctcagcagctcctgggaaccaggcttttaacccatggccattcactcaggccaaagtactgaaagggcaggcagtggggcatggcctgaagggagagcctgtgttctgtccagcactgtggcgcttctgctgtgtttgccctgactccacccaccctcagctaaccttaggttggggctggctgcgggggtgatcctgagggtacagcaggagagggatgttggacatgaagggggcaaccacacgggccatgtccacctccgggatcttgttggactcaagctgtttctggttttgctcggccaagtactcctgaagggactggcagaggttgagcgcagagcacacttccccagggttgctctggaaaggaaaagagacagctgagagcctttcccaagggcagcctgttgtcatccagtcagttcctccctcactcagtgtgcctagaagattaggaagttgcacaccaggtgtctaacctgcaggcttcccagccccccagtgtcactgctgcccatcatcagctcttccttaaagaaaaatgagccaccaaggagaggggaagagtcagagaccgatgtttggccagtgtgctcacagctgcaagctaaggcaccggactgacttcacacacacacacatctgtgcagctcacaaatcctgatctcttaccgtggctcacacttgcgaccacctcaattctaccccgctcaacctgcttcctggagtggccacttcagcaaatttcccagagacctggacgctgttcccagtccttaaagctcctgtatccctcttgagtttggctagcccatccatctttcaaaactcaatttccatctgttgccatcacacctcctagcaatgtgtgctgtccttcctgggtgtctttccatgggacacagaaggctttgtggatcaaatgaacaccttcctcacaaacccctggctccatctttggcactcttagccccaccggctggcttcttcagaatcccccttcttgaaagcctttcagactctacagaactagctcctggttcgctgccggctccggacacccagtttgggcacagtatacacttgctgagtgacaagtgagtatactagtagctgaccccacactgcatctcacggtcactcatgacttctgcattcacagagatgaagccatgcgcttgctctagacataaaggcctgacaagggctacccatttctccctatcaacaggatgcaggagtcaggaatccaaggcacctggcccagaaaatcaaacaggaaacccaccgtgctacagcacttggtgcaaggagccctatgaagaagagctgcaggagaaacccaaagccgggaatacgaacacactggcccttctgggccctagaagtgccttaaagggccctacccagtcacctaccatctcgcccttaatcatgtccaggatgacaggcaggtaagagtcaaccacctccttgcacgaggccgacaggctggagtcatgaatccactcacaggtcttctccaggtaatgaaggatctcctcctgcaagcgaccccatcagtgacgaaggcctaagtctgtaccctcagcatccatgtacacagaagccagggttgacaaagtataccccgaaccccagtgctgggggaggcggggcagtaagtttgtgtatcagaccaggcagatccaaaggggcagctggccagacagtctagctgaaatgagttacgtcaagagacgcggtcaacctcggcctccacgtgcccacacaccgatgggtaaaccccccagaccccaagcacatactctcaaatggcagtatgtaagctgggtgtggtggtacaggcccataatttcagctctcagacggctaaggcaaaaaggcttgagcaagttcaaggaaagcctgggctacctagcaaggctctgggttaaccaaacagccagggctagagcctttaatcctagcactctgaaggcagagacaggtataacttagttttgagggtagcctgagataggaagataggaacaccttgcctcaaaaaaaaaaaaaaaaaaggaattgtgtgcttcctgagcaccaggcacagagatggtacaaatctacacatgtaggcagaacactcgtacacaaaaataa

SEQ ID NO: 335 - DNA, 1053 bp, Mus musculus
cacactggctcacagaggagagttggtgagggatgactatgagcctcactacctagcctcagactcctaccaaccacttcccagtacctgtagtacatttcctcatgccccatagtgcctgagatgcacctgcccgtggtgcttagcctcctgggggctggttgggagacatgccggagcagctgtggccagggcaagcctcttctgatctcgcggcgcgtctgaagttgcagccagcgagcagtgagcagggatcgggcggccggagtggatcccagagagaccttcgcgccggcagcgagaagcggcggtggccaagactggagcaggtggcccgtgggggcagagccggtggcgagcagatcccgaggcgcggcgcaacgctgctccacctgcgcacacggagccatgaggtactccctggtcacttgctatgctgtgctctggcttctcatgctggtgcctggatcctggggccaggtgaaccgactacctttcttcaccaatcacttctttgacacgtacctgctcatcagtgaagacacgccagtgggttcttctgtgacccagctgctcgcccgagacatggacaatgaccctttggtgtttggcgtgtctggggaggaggcctcccgattctttgccgtggagcctgacacgggtgtggtgtggctccggcagccactggacagagagactaagtctgagttcacagtggagttctctgtcagtgaccaccaaggggtgatcacacggaaggtgaatatccaagttggagatgtgaatgacaatgcacccacattccacaaccagccctacagcgtgcgcatccctgaggtcttccacacccaggggctagcacaccccaaaagaattgtaccaaccacagccccgaaaatggagatggaggccatgcgtcagcagtcactgaggcggaagactctaaatggtgtggaagtaatgtttaaagtgtgccgcgattacagacatttccaacgggccgcgggcgacccgggcggcgccgggggctgaggaaataaatcctcaagtgtg

SEQ ID NO: 336 - protein, 207 aa, Mus musculus
MRYSLVTCYAVLWLLMLVPGSWGQVNRLPFFTNHFFDTYLLISEDTPVGSSVTQLLARDMDNDPLVFGVSGEEASRFFAVEPDTGVVWLRQPLDRETKSEFTVEFSVSDHQGVITRKVNIQVGDVNDNAPTFHNQPYSVRIPEVFHTQGLAHPKRIVPTTAPKMEMEAMRQQSLRRKTLNGVEVMFKVCRDYRHFQRAAGDPGGAGG

SEQ ID NO: 337 - DNA, 11005 bp, Mus musculus
cacactggctcacagaggagagttggtgagggatgactatgagcctcactacctagcctcagactcctaccaaccacttcccagtacctgtagtacatttcctcatgccccatagtgcctgagatgcacctgcccgtggtgcttagcctcctgggggctggttgggagacatgccggagcagctgtggccagggcaagcctcttctgatctcgcggcgcgtctgaagttgcagccagcgagcagtgagcagggatcgggcggccggagtggatcccagagagaccttcgcgccggcagcgagaagcggcggtggccaagactggagcaggtggcccgtgggggcagagccggtggcgagcagatcccgaggcgcggcgcaacgctgctccacctgcgcacacggagccatgaggtactccctggtcacttgctatgctgtgctctggcttctcatgctggtgcctggatcctggggccaggtgaaccgactacctttcttcaccaatcacttctttgacacgtacctgctcatcagtgaagacacgccagtgggttcttctgtgacccagctgctcgcccgagacatggacaatgaccctttggtgtttggcgtgtctggggaggaggcctcccgattctttgccgtggagcctgacacgggtgtggtgtggctccggcagccactggacagagagactaagtctgagttcacagtggagttctctgtcagtgaccaccaaggggtgatcacacggaaggtgaatatccaagttggagatgtgaatgacaatgcacccacattccacaaccagccctacagcgtgcgcatccctgagaacacaccagtggggacacccatcttcatcgtcaacgccaccgatcctgacctgggcgcggggggcagcgtcctctactccttccagcccccctctccgttcttcgccatcgacagtgcccgaggcatagtcaccgtgattcaggagctagactatgaggtcacgcaggcgtaccagctcacagtcaatgccacggatcaagacaagaccagacctctgtctacattggccaacctggccatcatcatcacggacatgcaagacatggatcctatcttcatcaacctgccctacagtactaacatctacgagcactctcctccaggcacaactgtgcgggtgatcactgctgtggaccaggataagggacggccccgtgggattggctacactattgtctcagggaataccaacagcatctttgccctggactacatcagcggagctctcaccctgaatggcctgctggaccgggagaaccccctgtacagtcacggcttcatcctgacagtgaagggcactgagctgaatgatgaccgtactccgtcagatgccaccgtcaccacgaccttcaacatcctggttattgacatcaatgacaatgccccagagttcaacagctctgagtacagcgtggccattacagagctggcacaggtcggcttcgctctccctctcttcatccaggtggtggacaaggatgagaacttgggtctgaacagcatgttcgaggtgtacctggtgggcaacaactcccaccacttcatcatctccccaacctccgtccaagggaaagcggacatccgcatccgagtggcaatcccgctggactatgagactgtggacagatacgactttgacctctttgccaacgagagtgtacccgaccacgtgggctatgccaaggtgaagattacgctcatcaatgaaaatgacaaccggcccatcttcagccagcccctctacaatgtcagcctgtatgagaacatcacggtggggacctccgtgctgacagtcctggcaacagacaatgacgtgggcacttttggggaagtcaactacttcttcagtgatgaccctgacaggttctcactggacaaggacacgggtctcatcatgctgatagcccggctagactatgaacttatccagcgtttcaccttgactgtcattgcccgggatggcggtggtgaggagaccacaggcagggtccggatcaatgtgctggatgtcaatgacaatgtgcccaccttccagaaggatgcctatgtgggtgctctgagggagaatgagccatctgtcacgcagctggtgcggctcagggcaacagatgaagactcccctcccaacaacctgatcacctacagcatcgtcaatgcatccgccttcggcagctacttcgacatcagcatatatgaaggctatggagtgatcagtgtgagccgccctctggattacgagcagatacccaatgggctgatctacctaacagtcatggccaaggatgctggcaaccctccgctctacagcaccgtccctgtcaccattgaggtgtttgatgagaacgacaaccctcccaccttcagcaagccggcctacttcgtgtctgtgctggagaacatcatggcaggagccacagtgttgtttctaaacgccacggacctggaccgctctcgggagtatgggcaggagtctatcatctactcgctggagggctcctcgcagtttcgcatcaatgctcgctctggagaaatcaccaccacgtctctgctggaccgagagaccaagtctgaatacatactcatcgtgcgtgctgtggatggcggtgtgggccacaaccagaaaactggcattgccacagtgaatgtcaccctcctagacatcaatgacaaccaccctacctggaaggatgctccttactacatcaacctggtagagatgacacctccagactctgatgtgaccacggtggtagctgtggacccagatctgggggagaatggcaccctggtgtacagcatccatccccccaacaagttctatagtctgaacagcaccacaggcaagatccgtaccacccacgtcatgctggaccgcgagaaccctgaccctgtggaagcggagctcatgcgaaagatcattgtctctgtcacagactgcggcagaccccctctgaaggccaccagcagtgccacggtctttgtgaacctcttggatctcaatgacaatgaccccaccttccggaacctgccttttgtggctgagattcttgagggcacccctgcaggggtctctgtctaccaggtggtggccatcgatctggacgagggcctgaatggactggtgtcctaccgcatgcaggtgggcatgccccgcatggactttgtcatcaacagcaccagcggtgtggtcacgacgacagccgaactggaccgggagcgcatcgccgagtaccagctgcgggtggtggccagcgatgctggcacacctaccaagagctccaccagcaccctcaccgtccgagtgttggatgtgaacgatgagactcccaccttcttccctgccgtgtacaacgtgtccgtgtctgaggacgttccccgtgagttccgcgtggtctggctgaactgcacagacaatgacgtgggcctcaatgcggagctcagctacttcatcacagcgggaaacgtggatgggaagtttagtgtgggctaccgtgatgccgtggtgagaaccgtagtcggcctggaccgtgagaccacggctgcgtacacactggtgctggaggccatagacaatggccctgtaggcaagaggcgcacgggtacagccaccgtgtttgtcacagttctggatgtgaatgacaaccggcccatctttctgcaaagcagctatgaggccagtgtccccgaagacatcccagaaggccacagcattgtgcagctgaaagccacggatgcagacgagggcgagtttgggcgcgtctggtaccgcatcctccacggtaaccatggcaacaacttccggatccacgtaggcagcgggctcctgatgcgagggccaaggcccctggacagggaacggaactcgtcccacgtactgatggtagaagcctacaaccatgacctggggcccatgcggagctctgtcagggtgatcgtgtatgtggaagatgtcaacgatgaggcccctgtattcacacagcagcagtacaaccgcctgggccttcgagagacagcaggcattggcacctcagtcatcgttgtccgagccactgacaaagacactggggacggtggcctggtgaactaccgcatcctgtcgggcgcagagggcaagtttgagattgacgagagcacggggctcatcgtgacggttgactacctggactacgagaccaagaccagctacctgatgaatgtgtctgccacagacggcgcaccccccttcaaccagggcttctgcagcgtctacgtgacacttctcaatgagctggacgaggctgttcagttctccaatgcttcctacgaggcagtcatcatggagaatctggctctggggacagagatcgtgcgggtgcaagcctattctatcgataacctcaaccagattacctaccgcttcgacgcctataccagtgcccaggccaaagccctcttcaagatagatgctatcacgggtgtgatcacagtcaaaggcttggtcgacagagagaagggcgacttctacacattgacagtcgtggcagacgatggcggccccaaggtggactctactgtgaaggtctacatcaccgttctggatgagaatgataacagcccacgcttcgacttcacctcggactcagccatcagtgtgcctgaggactgtcctgtgggccagcgagtagccacagtcaaggcccgggaccctgatgctggcagcaatggacaggtggtcttctccctggcctctggtaacattgctggggcctttgagattatcaccagcaatgactccattggtgaagtgtttgtggctaagcccctggacagggaagaactggaccactacatcctcaaggtcgtggcttctgaccgtggcactcctccacggaagaaagaccacatcttacaggtgaccattctggatgtcaatgacaaccctccagttattgaaagcccctttggatacaacgtcagtgtgaatgagaatgtgggtggaggcacctcagtggtccaagtgagagccaccgaccgtgacatcgggatcaacagtgtcctgtcctattacatcaccgagggcaacgaggacatgactttccgtatggaccgtatcagcggtgagattgctacacggcctgctccacccgaccgtgagcgccagaacttctaccatctggtggtcaccgtggaagatgagggcacccccacactgtcggccaccacccacgtgtacgtgactatcgtggacgagaatgacaacgctcctgtgttccagcagccacattatgaggtggtgctggatgagggcccagacacaatcaacaccagcctcatcaccgtccaggcactggacctggatgaggggccgaatggcactgtcacctatgccatcgtggcaggcaacatcatcaataccttccgaatcaacaagcacacgggtgtcattactgctgccaaggaactagactatgagatcagtcatggccgctacaccctgattgtcactgccacggaccagtgtcccatcttgtcccaccgcctcacctctactaccaccgtgctcgtgaatgtgaatgacatcaatgacaatgtgcccactttccctcgggactacgaaggaccattcgacgtcactgaaggccagccagggcccagagtgtggacattcctggcccatgaccgggactctggccccaatgggcaggtggagtacagtgttgtggatggagacccactaggggagtttgtgatctctcctgtggagggtgtgctgagggtccggaaggatgtcgaactggatagggagaccatcgccttctacaacctgaccatctgtgcccgagacaggggagtgccgccactcagctccacgatgctggtgggaatccgagtgctggacatcaatgacaatgacccagtgctactgaatcttcccatgaacgtcaccatcagtgagaacagccctgtctccagctttgtcgcccacgtcctggccagcgatgctgacagtggctgcaatgccctcctcaccttcaacatcaccgctggcaaccgagagcgggccttcttcatcaatgccacgacagggattgtcactgtcaaccggcccctggaccgagagcgcatcccagagtacaggctgactgtttctgtgaaggataacccggagaacccacgcatagccaggaaggactttgacttactgctggtatctctggctgatgaaaacgacaaccaccccctcttcactgagggcacgtaccaggccgaggtgatggagaactctcctgctgggacacccctcacagtgctcaatgggcctatcctggccctggacgctgatgaagatgtgtacgccgtagtcacgtatcagctcctgggcacccacagtgacctctttgttatcgacaacagcacaggcgtggtgactgtgaggtccgggatcatcattgaccgggaggccttctcacccccgttcctggagctgctgctgttggctgaagacattggacaactcaatggcacggcccacctgttcatcactatcctagatgacaatgacaactggcccaccttcagtcctcccacttataccgtccacctgctggagaactgcccaccaggattctcagtccttcaagtcacagccacggatgaggacagcggcctcaatggggagctggtataccgaatagaagccggggctcaggaccgcttcctcatccacccagtcacaggagtcatccgtgttggcaatgccaccatcgacagagaagagcaggagtcctacaggctgacggtggtggccaccgaccggggtaccgttcccttgtcgggcacagccatcgtcaccatcctgatcgacgacatcaatgactcccggcccgagttcctcaaccctatccagacagtgagcgtgctggaatccgcagagccaggcaccatcattgccaatgtcaccgccatcgatctcgacctcaaccccaaactggagtatcacatcatcagcatcgtggccaaggatgacaccgaccgcctggtgcctgaccaggaagacgcctttgctgtgaatatcaatacagggtctgtgatggtgaagtcccctctgaaccgcgagctggttgcaacctatgaggtcacgctctcagtaatcgacaatgccagcgacctcccagagcattctgtcagtgtgccaaacgccaagctcacggtcaacatcctggatgtcaatgacaacacaccgcagttcaagccctttgggatcacctactacacagagcgggtcctggagggggccacccccggcacgacgctcattgccgtggcagccgtggaccctgacaagggcctcaatgggctgatcacctacaccctgctggacctcacacccccaggctatgtccagctcgaagactcttccgcagggaaggtcatcgccaaccggactgtagactacgaggaagtgcactggcttaacttcactgtgagggcctcagacaacgggtccccaccccgggcagccgagatccctgtctacctggaaattgtagacattaatgacaacaaccccatcttcgatcagccctcctaccaggaggccgtttttgaggatatagctgtgggcacggtcatcctgagggttacagctacggatgcggactcgggcaacttcgccctcattgagtacagcctggtagatggagagggcaagttcgctatcaaccccaacaccggcgacatctctgtcctgtcctctctggaccgagagaagaaggaccactatatcttaactgccttggccaaagacaaccctggggatgtggccagtaaccgtcgagagaactcggtacaggtggtgatccgagtgcttgatgtcaatgactgtcggcctcagttctccaaaccgcagttcagcacgagtgtgtacgagaacgaaccagcaggcacctcggtcatcaccatgctggccaccgaccaggatgagggctccaatagccagctgacctactctctcgagggccctggaatggaggctttctctgtggacatggactcaggcctggtgaccacgcagcggccgctgcaatcctatgagaggttcaacctgactgtggtggctacagatggtggggagcccccactctggggcaccacgatgctcctggtggaggtcatcgatgtcaatgacaaccgacccgtctttgtgcgcccacccaatggcaccatcctgcacatcaaagaggagatcccgctacgttccaatgtgtatgaagtctatgctacagacaatgacgaaggcctcaatggggcagtacgctacagcttcctgaagactacaggcaaccgtgactgggagtacttcaccattgacccaattagcggcctcatccagacagcgcagcgcctggaccgtgagaagcaggccgtgtacagtctcatcttggtggccagtgacctgggccagccggtgccatatgagacgatgcaaccattgcaggtggccttggaggacatcgatgacaacgaacccctctttgtgaggcctcctaagggaagccctcagtaccagctgttgacggtgcctgaacactccccccgcggcacccttgtgggcaatgtgacaggtgccgtggatgcagatgagggtcccaacgccattgtatactacttcattgcagctggtgacgaggacaagaatttccacctgcagcccgatggacgcctgctagtgctcagagacctggatcgggagacggaagccaccttctccttcatcgtcaaagcgtccagcaatcgcagctggacccctcctcgtggaccctccccagccctcgatctgctgaccgatctcaccctgcaggaggtgcgcgttgtgctggaggacatcaatgaccagccgccacgcttcaccaaggctgagtacaccgcaggagtggccaccgatgccaaggtaggctcggagttgatccaggtgctggccctggatgcggacattggcaacaacagcctggtcttctatggcattctggctatccattacttccgggccctggccaacgactctgaggatgtgggccaggtcttcaccatggggagtgtggacggtatcctgcgcacctttgacctcttcatggcctacagccctggctattttgtggtagacatcgtggcccgagacctggccggccacaatgataccgccatcatcggcatctacatcctgagggatgaccagcgcgtgaagatcgtcatcaatgagatcccggaccgcgtgcgtggcttcgaggaggagttcattcgcctgctgtccaacatcacaggcgccattgtcaacaccgatgacgtgcagttccacgtggatatgaaagggagggtgaactttgcgcagacagaactgcttatccacgtggtcaatcgcgacacaaaccgcatcctggatgtggacagggtcatccagatgatcgatgagaacaaggagcagcttcggaacctcttcaggaactacaacgtgctggatgtgcagcccgccatctctgtccagctgccggatgacatgtctgccctgcagatggccatcattgtcctggccatccttctcttcttggctgccatgctcttcgtcctcatgaactggtactacaggaccatacacaagagaaagctaaaggccattgtggctggctctgcggggaaccgtggcttcattgacatcatggacatgcccaataccaacaaatactccttcgatggagccaaccctgtgtggctggaccccttctgccggaacctggagctggctgcgcaggccgagcacgaagatgacctccctgagaacctgagtgagatcgcagacctgtggaacagccccacccgcacccatggaacttttgggcgtgagcctgcagcagtcaagcccgatgatgacagatacctgcgtgcagccatccaggaatacgacaacatcgccaagctgggccagatcattcgagaggggcctattaagctgatccacaccgacctggaggaggagcctggggaccacagcccaggccagggcagcctccgtttccgacacaagccacccatggagctcaaggggcaagatggaatccacatggttcatggcagcacgggcacactgctggccactgatctcaacagcttgccggaggacgaccagaaggggctggaccgctcgctggagactctgacggcctctgaggccactgcctttgagcgcaatgcccgcacagagtcggccaagtccacccctctgcataagctccgggacgttatcatggagagccctctggaaatcacggagctgtgatggcaagcctgcccaccaccctccgaggcaggggcacggccggcccttcgcccagtacagcctttgtgggtgaccctgggctggccctggcagcctgcatggcggctcagatttgcctcctgccaggaactaattcagcatctgatctctaccttcataaaattggttatttttttaagaaaactttaaaaatgctaagtgtctaaggacaaggtgaggaggatctctgggggagccccagagactgaggcccagctcagctcttcccgacgcctctaaggagcagggagccagcacagaactgacaacccagccggcccacccctgcctcagtccaagccccactgcacttctgcctgctggacgtcagggtggcgctccgcccctgcacacacaccagtggatgagggaacaaagcatccgccccatcgcccccgcgtcgtcctgaggtgcccaggtgacagccgtgactgatgtccctccccctgggtgttgaatgtagagtgtttgtgtgtaacccttttctaaattaagttactccctcaggatttcctccaggttttgtttaactgatgctcagtgaaagtctctggaatgctctgtttaaaaagaaaagcaactcacatggaaccagcaa

SEQ ID NO: 338 - protein, 3283 aa, Mus musculus
MRYSLVTCYAVLWLLMLVPGSWGQVNRLPFFTNHFFDTYLLISEDTPVGSSVTQLLARDMDNDPLVFGVSGEEASRFFAVEPDTGVVWLRQPLDRETKSEFTVEFSVSDHQGVITRKVNIQVGDVNDNAPTFHNQPYSVRIPENTPVGTPIFIVNATDPDLGAGGSVKFQPPSPFFAIDSRIVTVIQELDYEVTQAYQLTVNATDQDKWLSTLANLAIIITDMQDMDPIFINLPYSTNIYEHSPPGTTVRVITAVDQDKGRPRGIGYTIVSGNTNSIFALDYISGALTLNGLLDRENPKHGFILTVKGTELNDDRTPSDATVTTTFNILVIDINDNAPEFNSSEYSVAITELAQVGFALPLFIQVVDKDENLQSMFEVYLVGNNSHHFIISPTSVQGKADIRIRVAIPLDYETVDRYDFDLFANESVPDHVGYAKVKITLINENDNRPIFSQPLYNVSLYENITVGTSVLTVLATDNDVGTFGEVNYFFSDDPDRFSLDKDTGLIMLIARLDYELIQRFTLTVIARDGGGEETTGRVRINVLDVNDNVPTFQKDAYVGALRENEPSVTQLVRLRATDEDSPPNNLITYSIVNASAFGSYFDISIYEGYGVISVSRPLDYEQIPNGLIYLTVMAKDAGNPPKTVPVTIEVFDENDNPPTFSKPAYFVSVLENIMAGATVLFLNATDLDRSREYGQESIIYSLEGSSQFRINARSGEITTTSLLDRETKSEYILIVRAVDGGVGHNQKTGIATVNVTLLDINDNHPTWKDAPYYINLVEMTPPDSDVTTVVAVDPDLGENGTLVYSIHPPNKFYSLNSTTGKIRTTHVMLDRENPDPVEAELMRKIIVSVTDCGRPPLKATSSATVFVNLLDLNDNDPTFRNLPFVAEIGTPAGVSVYQVVAIDLDEQGLVSYRMQVGMPRMDFVINSTSGVVTTTAELDRERIAEYQLRVVASDAGTPTKSSTSTLTVRVLDVNDETPTFFPAVYNVSVSEDVPREFRVVWLNCTDNDVQAELSYFITAGNVDGKFSVGYRDAVVRTVVGLDRETTAAYTLVLEAIDNGPVGKRRTGTATVFVTVLDVNDNRPIFLQSSYEASVPEDIPEGHSIVQLKATDADEGEFGRVWYRILHGNHGNNFRIHVGSGLLMRGPRPLDRERNSSHVLMVEAYNHDLGPMRSSVRVIVYVEDVNDEAPVFTQQQYNRLGLRETAGIGTSVIVVRATDKDTGDGGLVNYRILSGAEGKFEIDESTGLIVTVDYLDYETKTSYLMNVSATDGAPPFNQGFCSVYVTLLNELDEAVQFSNASYEAVIMENLALGTEIVRVQAYSIDNLNQIYFDAYTSAQAKALFKIDAITGVITVKGLVDREKGDFYTLTVVADDGGPKVDSTVKVYITVLDENDNSPRFDFTSDSAISVPEDCPVGQRVATVKARDPDAGSNGQVVFSLASGNIAGAFEIITSNDSIGEVFVAKPLDREELDHYILKVVASDRGTPPRKKDHILQVTILDVNDNPPVIESPFGYNVSVNENVGGGTSVVQVRATDRDIGINSVLSYYITEGNEDMTFRMDRISGEIAWAPPDRERQNFYHLVVTVEDEGTPTLSATTHVYVTIVDENDNAPVFQQPHYEVVLDEGPDTINTSLITVQALDLDEGPNGTVTYAIVAGNIINTFRINKHTGVITAAKELDYEISHGRYTLIVTATDQCPILSHRLTSTTTVLVNVNDINDNVPTFPRDYEGPFDVTEGQPGPRVWTFLAHDRDSGPNGQVEYSVVDGDPLGEFVISPVEGVLRVRKDVELDRETIAFYNLTICARDRGVPPLSSTMLVGIRVLDINDNDPVLLNLPMNVTISENSPVSSFVAHVLASDADSGCNALLTFNITAGNRERAFFINATTGIVTVNRPLDRERIPEYRLTVSVKDNPENPRIARKDFDLLLVSLADENDNHPLFTEGTYQAEVMENSPAGTPLTVLNGPILALDADEDVYAVVTYQLLGTHSDLFVIDNSTGVVTVRSGIIIDREAFSPPFLELLLLAEDIGQLNGTAHLFITILDDNDNWPTFSPPTYTVHLLENCPPGFSVLQVTATDEDSQGELVYRIEAGAQDRFLIHPVTGVIRVGNATIDREEQESYRLTVVATDRGTVPLSGTAIVTILIDDINDSRPEFLNPIQTVSVLESAEPGTIIANVTAIDLDLNPKLEYHIISIVAKDDTDRLVPDQEDAFAVNINTGSVMVKSPLNRELVATYEVTLSVIDNASDLPEHSVSVPNAKLTVNILDVNDNTPQFKPFGITYYTERVLEGATPGTTLIAVAAVDPDKQGLITYTLLDLTPPGYVQLEDSSAGKVIANRTVDYEEVHWLNFTVRASDNGSPPRAAEIPVYLEIVDINDNNPIFDQPSYQEAVFEDIAVGTVILRVTATDADSGNFALIEYSLVDGEGKFAINPNTGDISVLSSLDREKKDHYILTAKDNPGDVNRRENSVQVVIRVLDVNDCRPQFSKPQFSTSVYENEPAGTSVITMLATDQDEGSNSQLTYSLEGPGMEAFSVDMDSGLVTTQRPLQSYERFNLTVVATDGGEPPLWGTTMLLVEVIDVNDNRPVFVRPPNGTILHIKEEIPLRSNVYEVYATDNDEQGAVRYSFLKTTGNRDWEYFTIDPISGLIQTAQRLDREKQAVYSLILVASDLGQPVPYETMQPLQVEDIDDNEPLFVRPPKGSPQYQLLTVPEHSPRGTLVGNVTGAVDADEGPNAIVYYFIAAGDEDKNFHLQPDGRLLVLRDLDRETEATFSFIVKASSNRSWTPPRGPSPALDLLTDLTLQEVRVVLEDINDQPPRFTKAEYTAGVATDAKVGSELIQVLALDADIGNNSLVFYGILAIHYFRANDSEDVGQVFTMGSVDGILRTFDLFMAYSPGYFVVDIVARDLAGHNDTAIIGIYILRDDQRVKIVINEIPDRVRGFEEEFIRLLSNITGAIVNTDDVQFHVDMKGRVNFAQTELLIHVVNRDTNRILDVDRVIQMIDENKEQLRNLFRNYNVLDVQPAISVQLPDDMSALQMAIIVLAILLFLAAMLFVLMNWYYRTIHKRKLKAIVAGSAGNRGFIDIMDMPNTNKYSFDGANPVWLDPFCRNLELAAQAEHEDDLPENLSEIADLWNSPTRTHGTFGREPAAVKPDDDRYLRAAIQEYDNIAKLGQIIREGPIKLIHTDLEEEPGDHSPGQGSLRFRHKPPMELKGQDGIHMVHGSTGTLLATDLNSLPEDDQKGLDRSLETLTASEATAFERNARTESAKSTPLHKLRDVIMESPLEITEL

SEQ ID NO: 339 - DNA, 11110 bp, Mus musculus
cacactggctcacagaggagagttggtgagggatgactatgagcctcactacctagcctcagactcctaccaaccacttcccagtacctgtagtacatttcctcatgccccatagtgcctgagatgcacctgcccgtggtgcttagcctcctgggggctggttgggagacatgccggagcagctgtggccagggcaagcctcttctgatctcgcggcgcgtctgaagttgcagccagcgagcagtgagcagggatcgggcggccggagtggatcccagagagaccttcgcgccggcagcgagaagcggcggtggccaagactggagcaggtggcccgtgggggcagagccggtggcgagcagatcccgaggcgcggcgcaacgctgctccacctgcgcacacggagccatgaggtactccctggtcacttgctatgctgtgctctggcttctcatgctggtgcctggatcctggggccaggtgaaccgactacctttcttcaccaatcacttctttgacacgtacctgctcatcagtgaagacacgccagtgggttcttctgtgacccagctgctcgcccgagacatggacaatgaccctttggtgtttggcgtgtctggggaggaggcctcccgattctttgccgtggagcctgacacgggtgtggtgtggctccggcagccactggacagagagactaagtctgagttcacagtggagttctctgtcagtgaccaccaaggggtgatcacacggaaggtgaatatccaagttggagatgtgaatgacaatgcacccacattccacaaccagccctacagcgtgcgcatccctgagaacacaccagtggggacacccatcttcatcgtcaacgccaccgatcctgacctgggcgcggggggcagcgtcctctactccttccagcccccctctccgttcttcgccatcgacagtgcccgaggcatagtcaccgtgattcaggagctagactatgaggtcacgcaggcgtaccagctcacagtcaatgccacggatcaagacaagaccagacctctgtctacattggccaacctggccatcatcatcacggacatgcaagacatggatcctatcttcatcaacctgccctacagtactaacatctacgagcactctcctccaggcacaactgtgcgggtgatcactgctgtggaccaggataagggacggccccgtgggattggctacactattgtctcagggaataccaacagcatctttgccctggactacatcagcggagctctcaccctgaatggcctgctggaccgggagaaccccctgtacagtcacggcttcatcctgacagtgaagggcactgagctgaatgatgaccgtactccgtcagatgccaccgtcaccacgaccttcaacatcctggttattgacatcaatgacaatgccccagagttcaacagctctgagtacagcgtggccattacagagctggcacaggtcggcttcgctctccctctcttcatccaggtggtggacaaggatgagaacttgggtctgaacagcatgttcgaggtgtacctggtgggcaacaactcccaccacttcatcatctccccaacctccgtccaagggaaagcggacatccgcatccgagtggcaatcccgctggactatgagactgtggacagatacgactttgacctctttgccaacgagagtgtacccgaccacgtgggctatgccaaggtgaagattacgctcatcaatgaaaatgacaaccggcccatcttcagccagcccctctacaatgtcagcctgtatgagaacatcacggtggggacctccgtgctgacagtcctggcaacagacaatgacgtgggcacttttggggaagtcaactacttcttcagtgatgaccctgacaggttctcactggacaaggacacgggtctcatcatgctgatagcccggctagactatgaacttatccagcgtttcaccttgactgtcattgcccgggatggcggtggtgaggagaccacaggcagggtccggatcaatgtgctggatgtcaatgacaatgtgcccaccttccagaaggatgcctatgtgggtgctctgagggagaatgagccatctgtcacgcagctggtgcggctcagggcaacagatgaagactcccctcccaacaacctgatcacctacagcatcgtcaatgcatccgccttcggcagctacttcgacatcagcatatatgaaggctatggagtgatcagtgtgagccgccctctggattacgagcagatacccaatgggctgatctacctaacagtcatggccaaggatgctggcaaccctccgctctacagcaccgtccctgtcaccattgaggtgtttgatgagaacgacaaccctcccaccttcagcaagccggcctacttcgtgtctgtgctggagaacatcatggcaggagccacagtgttgtttctaaacgccacggacctggaccgctctcgggagtatgggcaggagtctatcatctactcgctggagggctcctcgcagtttcgcatcaatgctcgctctggagaaatcaccaccacgtctctgctggaccgagagaccaagtctgaatacatactcatcgtgcgtgctgtggatggcggtgtgggccacaaccagaaaactggcattgccacagtgaatgtcaccctcctagacatcaatgacaaccaccctacctggaaggatgctccttactacatcaacctggtagagatgacacctccagactctgatgtgaccacggtggtagctgtggacccagatctgggggagaatggcaccctggtgtacagcatccatccccccaacaagttctatagtctgaacagcaccacaggcaagatccgtaccacccacgtcatgctggaccgcgagaaccctgaccctgtggaagcggagctcatgcgaaagatcattgtctctgtcacagactgcggcagaccccctctgaaggccaccagcagtgccacggtctttgtgaacctcttggatctcaatgacaatgaccccaccttccggaacctgccttttgtggctgagattcttgagggcacccctgcaggggtctctgtctaccaggtggtggccatcgatctggacgagggcctgaatggactggtgtcctaccgcatgcaggtgggcatgccccgcatggactttgtcatcaacagcaccagcggtgtggtcacgacgacagccgaactggaccgggagcgcatcgccgagtaccagctgcgggtggtggccagcgatgctggcacacctaccaagagctccaccagcaccctcaccgtccgagtgttggatgtgaacgatgagactcccaccttcttccctgccgtgtacaacgtgtccgtgtctgaggacgttccccgtgagttccgcgtggtctggctgaactgcacagacaatgacgtgggcctcaatgcggagctcagctacttcatcacagcgggaaacgtggatgggaagtttagtgtgggctaccgtgatgccgtggtgagaaccgtagtcggcctggaccgtgagaccacggctgcgtacacactggtgctggaggccatagacaatggccctgtaggcaagaggcgcacgggtacagccaccgtgtttgtcacagttctggatgtgaatgacaaccggcccatctttctgcaaagcagctatgaggccagtgtccccgaagacatcccagaaggccacagcattgtgcagctgaaagccacggatgcagacgagggcgagtttgggcgcgtctggtaccgcatcctccacggtaaccatggcaacaacttccggatccacgtaggcagcgggctcctgatgcgagggccaaggcccctggacagggaacggaactcgtcccacgtactgatggtagaagcctacaaccatgacctggggcccatgcggagctctgtcagggtgatcgtgtatgtggaagatgtcaacgatgaggcccctgtattcacacagcagcagtacaaccgcctgggccttcgagagacagcaggcattggcacctcagtcatcgttgtccgagccactgacaaagacactggggacggtggcctggtgaactaccgcatcctgtcgggcgcagagggcaagtttgagattgacgagagcacggggctcatcgtgacggttgactacctggactacgagaccaagaccagctacctgatgaatgtgtctgccacagacggcgcaccccccttcaaccagggcttctgcagcgtctacgtgacacttctcaatgagctggacgaggctgttcagttctccaatgcttcctacgaggcagtcatcatggagaatctggctctggggacagagatcgtgcgggtgcaagcctattctatcgataacctcaaccagattacctaccgcttcgacgcctataccagtgcccaggccaaagccctcttcaagatagatgctatcacgggtgtgatcacagtcaaaggcttggtcgacagagagaagggcgacttctacacattgacagtcgtggcagacgatggcggccccaaggtggactctactgtgaaggtctacatcaccgttctggatgagaatgataacagcccacgcttcgacttcacctcggactcagccatcagtgtgcctgaggactgtcctgtgggccagcgagtagccacagtcaaggcccgggaccctgatgctggcagcaatggacaggtggtcttctccctggcctctggtaacattgctggggcctttgagattatcaccagcaatgactccattggtgaagtgtttgtggctaagcccctggacagggaagaactggaccactacatcctcaaggtcgtggcttctgaccgtggcactcctccacggaagaaagaccacatcttacaggtgaccattctggatgtcaatgacaaccctccagttattgaaagcccctttggatacaacgtcagtgtgaatgagaatgtgggtggaggcacctcagtggtccaagtgagagccaccgaccgtgacatcgggatcaacagtgtcctgtcctattacatcaccgagggcaacgaggacatgactttccgtatggaccgtatcagcggtgagattgctacacggcctgctccacccgaccgtgagcgccagaacttctaccatctggtggtcaccgtggaagatgagggcacccccacactgtcggccaccacccacgtgtacgtgactatcgtggacgagaatgacaacgctcctgtgttccagcagccacattatgaggtggtgctggatgagggcccagacacaatcaacaccagcctcatcaccgtccaggcactggacctggatgaggggccgaatggcactgtcacctatgccatcgtggcaggcaacatcatcaataccttccgaatcaacaagcacacgggtgtcattactgctgccaaggaactagactatgagatcagtcatggccgctacaccctgattgtcactgccacggaccagtgtcccatcttgtcccaccgcctcacctctactaccaccgtgctcgtgaatgtgaatgacatcaatgacaatgtgcccactttccctcgggactacgaaggaccattcgacgtcactgaaggccagccagggcccagagtgtggacattcctggcccatgaccgggactctggccccaatgggcaggtggagtacagtgttgtggatggagacccactaggggagtttgtgatctctcctgtggagggtgtgctgagggtccggaaggatgtcgaactggatagggagaccatcgccttctacaacctgaccatctgtgcccgagacaggggagtgccgccactcagctccacgatgctggtgggaatccgagtgctggacatcaatgacaatgacccagtgctactgaatcttcccatgaacgtcaccatcagtgagaacagccctgtctccagctttgtcgcccacgtcctggccagcgatgctgacagtggctgcaatgccctcctcaccttcaacatcaccgctggcaaccgagagcgggccttcttcatcaatgccacgacagggattgtcactgtcaaccggcccctggaccgagagcgcatcccagagtacaggctgactgtttctgtgaaggataacccggagaacccacgcatagccaggaaggactttgacttactgctggtatctctggctgatgaaaacgacaaccaccccctcttcactgagggcacgtaccaggccgaggtgatggagaactctcctgctgggacacccctcacagtgctcaatgggcctatcctggccctggacgctgatgaagatgtgtacgccgtagtcacgtatcagctcctgggcacccacagtgacctctttgttatcgacaacagcacaggcgtggtgactgtgaggtccgggatcatcattgaccgggaggccttctcacccccgttcctggagctgctgctgttggctgaagacattggacaactcaatggcacggcccacctgttcatcactatcctagatgacaatgacaactggcccaccttcagtcctcccacttataccgtccacctgctggagaactgcccaccaggattctcagtccttcaagtcacagccacggatgaggacagcggcctcaatggggagctggtataccgaatagaagccggggctcaggaccgcttcctcatccacccagtcacaggagtcatccgtgttggcaatgccaccatcgacagagaagagcaggagtcctacaggctgacggtggtggccaccgaccggggtaccgttcccttgtcgggcacagccatcgtcaccatcctgatcgacgacatcaatgactcccggcccgagttcctcaaccctatccagacagtgagcgtgctggaatccgcagagccaggcaccatcattgccaatgtcaccgccatcgatctcgacctcaaccccaaactggagtatcacatcatcagcatcgtggccaaggatgacaccgaccgcctggtgcctgaccaggaagacgcctttgctgtgaatatcaatacagggtctgtgatggtgaagtcccctctgaaccgcgagctggttgcaacctatgaggtcacgctctcagtaatcgacaatgccagcgacctcccagagcattctgtcagtgtgccaaacgccaagctcacggtcaacatcctggatgtcaatgacaacacaccgcagttcaagccctttgggatcacctactacacagagcgggtcctggagggggccacccccggcacgacgctcattgccgtggcagccgtggaccctgacaagggcctcaatgggctgatcacctacaccctgctggacctcacacccccaggctatgtccagctcgaagactcttccgcagggaaggtcatcgccaaccggactgtagactacgaggaagtgcactggcttaacttcactgtgagggcctcagacaacgggtccccaccccgggcagccgagatccctgtctacctggaaattgtagacattaatgacaacaaccccatcttcgatcagccctcctaccaggaggccgtttttgaggatatagctgtgggcacggtcatcctgagggttacagctacggatgcggactcgggcaacttcgccctcattgagtacagcctggtagatggagagggcaagttcgctatcaaccccaacaccggcgacatctctgtcctgtcctctctggaccgagagaagaaggaccactatatcttaactgccttggccaaagacaaccctggggatgtggccagtaaccgtcgagagaactcggtacaggtggtgatccgagtgcttgatgtcaatgactgtcggcctcagttctccaaaccgcagttcagcacgagtgtgtacgagaacgaaccagcaggcacctcggtcatcaccatgctggccaccgaccaggatgagggctccaatagccagctgacctactctctcgagggccctggaatggaggctttctctgtggacatggactcaggcctggtgaccacgcagcggccgctgcaatcctatgagaggttcaacctgactgtggtggctacagatggtggggagcccccactctggggcaccacgatgctcctggtggaggtcatcgatgtcaatgacaaccgacccgtctttgtgcgcccacccaatggcaccatcctgcacatcaaagaggagatcccgctacgttccaatgtgtatgaagtctatgctacagacaatgacgaaggcctcaatggggcagtacgctacagcttcctgaagactacaggcaaccgtgactgggagtacttcaccattgacccaattagcggcctcatccagacagcgcagcgcctggaccgtgagaagcaggccgtgtacagtctcatcttggtggccagtgacctgggccagccggtgccatatgagacgatgcaaccattgcaggtggccttggaggacatcgatgacaacgaacccctctttgtgaggcctcctaagggaagccctcagtaccagctgttgacggtgcctgaacactccccccgcggcacccttgtgggcaatgtgacaggtgccgtggatgcagatgagggtcccaacgccattgtatactacttcattgcagctggtgacgaggacaagaatttccacctgcagcccgatggacgcctgctagtgctcagagacctggatcgggagacggaagccaccttctccttcatcgtcaaagcgtccagcaatcgcagctggacccctcctcgtggaccctccccagccctcgatctgctgaccgatctcaccctgcaggaggtgcgcgttgtgctggaggacatcaatgaccagccgccacgcttcaccaaggctgagtacaccgcaggagtggccaccgatgccaaggtaggctcggagttgatccaggtgctggccctggatgcggacattggcaacaacagcctggtcttctatggcattctggctatccattacttccgggccctggccaacgactctgaggatgtgggccaggtcttcaccatggggagtgtggacggtatcctgcgcacctttgacctcttcatggcctacagccctggctattttgtggtagacatcgtggcccgagacctggccggccacaatgataccgccatcatcggcatctacatcctgagggatgaccagcgcgtgaagatcgtcatcaatgagatcccggaccgcgtgcgtggcttcgaggaggagttcattcgcctgctgtccaacatcacaggcgccattgtcaacaccgatgacgtgcagttccacgtggatatgaaagggagggtgaactttgcgcagacagaactgcttatccacgtggtcaatcgcgacacaaaccgcatcctggatgtggacagggtcatccagatgatcgatgagaacaaggagcagcttcggaacctcttcaggaactacaacgtgctggatgtgcagcccgccatctctgtccagctgccggatgacatgtctgccctgcagatggccatcattgtcctggccatccttctcttcttggctgccatgctcttcgtcctcatgaactggtactacaggaccatacacaagagaaagctaaaggccattgtggctggctctgcggggaaccgtggcttcattgacatcatggacatgcccaataccaacaaatactccttcgatggagccaaccctgtgtggctggaccccttctgccggaacctggagctggctgcgcaggccgagcacgaagatgacctccctgagaacctgagtgagatcgcagacctgtggaacagccccacccgcacccatggaacttttgggcgtgagcctgcagcagtcaagcccgatgatgacagatacctgcgtgcagccatccaggaatacgacaacatcgccaagctgggccagatcattcgagaggggcctattaagggctcgctgctgaaggtggtcctggaggattacctacggctcaaaaaactctttgcacaacggatggtacaaaaagcctcctcctgccattcctccatctccgagctgatccacaccgacctggaggaggagcctggggaccacagcccaggccagggcagcctccgtttccgacacaagccacccatggagctcaaggggcaagatggaatccacatggttcatggcagcacgggcacactgctggccactgatctcaacagcttgccggaggacgaccagaaggggctggaccgctcgctggagactctgacggcctctgaggccactgcctttgagcgcaatgcccgcacagagtcggccaagtccacccctctgcataagctccgggacgttatcatggagagccctctggaaatcacggagctgtgatggcaagcctgcccaccaccctccgaggcaggggcacggccggcccttcgcccagtacagcctttgtgggtgaccctgggctggccctggcagcctgcatggcggctcagatttgcctcctgccaggaactaattcagcatctgatctctaccttcataaaattggttatttttttaagaaaactttaaaaatgctaagtgtctaaggacaaggtgaggaggatctctgggggagccccagagactgaggcccagctcagctcttcccgacgcctctaaggagcagggagccagcacagaactgacaacccagccggcccacccctgcctcagtccaagccccactgcacttctgcctgctggacgtcagggtggcgctccgcccctgcacacacaccagtggatgagggaacaaagcatccgccccatcgcccccgcgtcgtcctgaggtgcccaggtgacagccgtgactgatgtccctccccctgggtgttgaatgtagagtgtttgtgtgtaacccttttctaaattaagttactccctcaggatttcctccaggttttgtttaactgatgctcagtgaaagtctctggaatgctctgtttaaaaagaaaagcaactcacatggaaccagcaa

SEQ ID NO: 340 - protein, 3318 aa, Mus musculus
MRYSLVTCYAVLWLLMLVPGSWGQVNRLPFFTNHFFDTYLLISEDTPVGSSVTQLLARDMDNDPLVFGVSGEEASRFFAVEPDTGVVWLRQPLDRETKSEFTVEFSVSDHQGVITRKVNIQVGDVNDNAPTFHNQPYSVRIPENTPVGTPIFIVNATDPDLGAGGSVKFQPPSPFFAIDSRIVTVIQELDYEVTQAYQLTVNATDQDKWLSTLANLAIIITDMQDMDPIFINLPYSTNIYEHSPPGTTVRVITAVDQDKGRPRGIGYTIVSGNTNSIFALDYISGALTLNGLLDRENPKHGFILTVKGTELNDDRTPSDATVTTTFNILVIDINDNAPEFNSSEYSVAITELAQVGFALPLFIQVVDKDENLQSMFEVYLVGNNSHHFIISPTSVQGKADIRIRVAIPLDYETVDRYDFDLFANESVPDHVGYAKVKITLINENDNRPIFSQPLYNVSLYENITVGTSVLTVLATDNDVGTFGEVNYFFSDDPDRFSLDKDTGLIMLIARLDYELIQRFTLTVIARDGGGEETTGRVRINVLDVNDNVPTFQKDAYVGALRENEPSVTQLVRLRATDEDSPPNNLITYSIVNASAFGSYFDISIYEGYGVISVSRPLDYEQIPNGLIYLTVMAKDAGNPPKTVPVTIEVFDENDNPPTFSKPAYFVSVLENIMAGATVLFLNATDLDRSREYGQESIIYSLEGSSQFRINARSGEITTTSLLDRETKSEYILIVRAVDGGVGHNQKTGIATVNVTLLDINDNHPTWKDAPYYINLVEMTPPDSDVTTVVAVDPDLGENGTLVYSIHPPNKFYSLNSTTGKIRTTHVMLDRENPDPVEAELMRKIIVSVTDCGRPPLKATSSATVFVNLLDLNDNDPTFRNLPFVAEIGTPAGVSVYQVVAIDLDEQGLVSYRMQVGMPRMDFVINSTSGVVTTTAELDRERIAEYQLRVVASDAGTPTKSSTSTLTVRVLDVNDETPTFFPAVYNVSVSEDVPREFRVVWLNCTDNDVQAELSYFITAGNVDGKFSVGYRDAVVRTVVGLDRETTAAYTLVLEAIDNGPVGKRRTGTATVFVTVLDVNDNRPIFLQSSYEASVPEDIPEGHSIVQLKATDADEGEFGRVWYRILHGNHGNNFRIHVGSGLLMRGPRPLDRERNSSHVLMVEAYNHDLGPMRSSVRVIVYVEDVNDEAPVFTQQQYNRLGLRETAGIGTSVIVVRATDKDTGDGGLVNYRILSGAEGKFEIDESTGLIVTVDYLDYETKTSYLMNVSATDGAPPFNQGFCSVYVTLLNELDEAVQFSNASYEAVIMENLALGTEIVRVQAYSIDNLNQIYFDAYTSAQAKALFKIDAITGVITVKGLVDREKGDFYTLTVVADDGGPKVDSTVKVYITVLDENDNSPRFDFTSDSAISVPEDCPVGQRVATVKARDPDAGSNGQVVFSLASGNIAGAFEIITSNDSIGEVFVAKPLDREELDHYILKVVASDRGTPPRKKDHILQVTILDVNDNPPVIESPFGYNVSVNENVGGGTSVVQVRATDRDIGINSVLSYYITEGNEDMTFRMDRISGEIAWAPPDRERQNFYHLVVTVEDEGTPTLSATTHVYVTIVDENDNAPVFQQPHYEVVLDEGPDTINTSLITVQALDLDEGPNGTVTYAIVAGNIINTFRINKHTGVITAAKELDYEISHGRYTLIVTATDQCPILSHRLTSTTTVLVNVNDINDNVPTFPRDYEGPFDVTEGQPGPRVWTFLAHDRDSGPNGQVEYSVVDGDPLGEFVISPVEGVLRVRKDVELDRETIAFYNLTICARDRGVPPLSSTMLVGIRVLDINDNDPVLLNLPMNVTISENSPVSSFVAHVLASDADSGCNALLTFNITAGNRERAFFINATTGIVTVNRPLDRERIPEYRLTVSVKDNPENPRIARKDFDLLLVSLADENDNHPLFTEGTYQAEVMENSPAGTPLTVLNGPILALDADEDVYAVVTYQLLGTHSDLFVIDNSTGVVTVRSGIIIDREAFSPPFLELLLLAEDIGQLNGTAHLFITILDDNDNWPTFSPPTYTVHLLENCPPGFSVLQVTATDEDSQGELVYRIEAGAQDRFLIHPVTGVIRVGNATIDREEQESYRLTVVATDRGTVPLSGTAIVTILIDDINDSRPEFLNPIQTVSVLESAEPGTIIANVTAIDLDLNPKLEYHIISIVAKDDTDRLVPDQEDAFAVNINTGSVMVKSPLNRELVATYEVTLSVIDNASDLPEHSVSVPNAKLTVNILDVNDNTPQFKPFGITYYTERVLEGATPGTTLIAVAAVDPDKQGLITYTLLDLTPPGYVQLEDSSAGKVIANRTVDYEEVHWLNFTVRASDNGSPPRAAEIPVYLEIVDINDNNPIFDQPSYQEAVFEDIAVGTVILRVTATDADSGNFALIEYSLVDGEGKFAINPNTGDISVLSSLDREKKDHYILTAKDNPGDVNRRENSVQVVIRVLDVNDCRPQFSKPQFSTSVYENEPAGTSVITMLATDQDEGSNSQLTYSLEGPGMEAFSVDMDSGLVTTQRPLQSYERFNLTVVATDGGEPPLWGTTMLLVEVIDVNDNRPVFVRPPNGTILHIKEEIPLRSNVYEVYATDNDEQGAVRYSFLKTTGNRDWEYFTIDPISGLIQTAQRLDREKQAVYSLILVASDLGQPVPYETMQPLQVEDIDDNEPLFVRPPKGSPQYQLLTVPEHSPRGTLVGNVTGAVDADEGPNAIVYYFIAAGDEDKNFHLQPDGRLLVLRDLDRETEATFSFIVKASSNRSWTPPRGPSPALDLLTDLTLQEVRVVLEDINDQPPRFTKAEYTAGVATDAKVGSELIQVLALDADIGNNSLVFYGILAIHYFRANDSEDVGQVFTMGSVDGILRTFDLFMAYSPGYFVVDIVARDLAGHNDTAIIGIYILRDDQRVKIVINEIPDRVRGFEEEFIRLLSNITGAIVNTDDVQFHVDMKGRVNFAQTELLIHVVNRDTNRILDVDRVIQMIDENKEQLRNLFRNYNVLDVQPAISVQLPDDMSALQMAIIVLAILLFLAAMLFVLMNWYYRTIHKRKLKAIVAGSAGNRGFIDIMDMPNTNKYSFDGANPVWLDPFCRNLELAAQAEHEDDLPENLSEIADLWNSPTRTHGTFGREPAAVKPDDDRYLRAAIQEYDNIAKLGQIIREGPIKGSLLKVVLEDYLRLKKLFAQRMVQKASSCHSSISELIHTDLEEEPGDHSPGQGSLRFRHKPPMELKGQDGIHMVHGSTGTLLATDLNSLPEDDQKGLDRSLETLTASEATAFERNARTESAKSTPLHKLRDVIMESPLEITEL
